United States Patent Application Publication US 2025/0223582 A1 - sequence listing, part 2

SEQ ID NO: 2589 - DNA, 1038 bp, synthetic construct
  misc_feature 1..1038: note = variant of RNA ligase 2 from Klebsiella phage KP179
  source 1..1038: mol_type = other DNA
atgcatcaccatcaccatcacggtggcagcaacatgtttgcgtattattcaagtctggaaaaccataccaatgccaagttcattagcaagatccgtggtgcaggcttcctgatgcacaccgtggaatgggtagctcgcgagaagattcatggaacgaactttagcgttatcattactccgaccgaaatcgtgccagccaaacgcacagggccgatcttggaagatgagagcttctttggtcatgaaattatcatgaaaaaatatatggactccttcgtgaaggtgcagaacatgctgaatgcgatggatcttgttagcgtgcaaatctttggcgaatttgcgggtggtggcattcagaaaggcgtcgattacggagacaaagatttctatgtgtttgacatcctgtctgatagcgggaacgagaaagtttactgggatgactatcgcgtcgaatcgttttgcaccactgtgggtctgaaattagcgcctctgctgggacgtggtagtttcgctgaactgtcccagtacccaaacgatttcaaaagcctggtgaaccgttataatgaattggttgacacggtcggcctggagatggccaataaacacgtctttggtccgcaagcgtcttctgaaactggcctggcagaaggctacgttcttaaacccgtctatccgcgcttctttaatgtgggtacgcgcgtggcgattaaatgcaagaactccaaattttcggagaaagccaaactgatttcgccaattaaagcgaaggttgaactgacggagaacgatgttcgtctgctcggaatctttagcgaatatgttacctggaatcgcgtcagtaacgtactgtcacatattggctcagtgaccgccaaagattttgggcgtgtttcgggtctgacgatgaaagacatcattcgcgaagcagcacgcgaaggccatgatctgttgttcgctgataacccgtcggcggtgctgaaggagctgacaggcctcatccagaacacgattcgctccaaatggcacgaagttctggag

SEQ ID NO: 2590 - protein, 346 aa, synthetic construct
  REGION 1..346: note = variant of RNA ligase 2 from Klebsiella phage KP179
MHHHHHHGGSNMFAYYSSLENHTNAKFISKIRGAGFLMHTVEWVAREKIHGTNFSVIITPTEIVPAKRTGPILEDESFFGHEIIMKKYMDSFVKVQNMLNAMDLVSVQIFGEFAGGGIQKGVDYGDKDFYVFDILSDSGNEKVYWDDYRVESFCTTVGLKLAPLLGRGSFAELSQYPNDFKSLVNRYNELVDTVGLEMANKHVFGPQASSETGLAEGYVLKPVYPRFFNVGTRVAIKCKNSKFSEKAKLISPIKAKVELTENDVRLLGIFSEYVTWNRVSNVLSHIGSVTAKDFGRVSGLTMKDIIREAAREGHDLLFADNPSAVLKELTGLIQNTIRSKWHEVLE

SEQ ID NO: 2591 - DNA, 1038 bp, synthetic construct
  misc_feature 1..1038: note = variant of RNA ligase 2 from Klebsiella phage KP179
  source 1..1038: mol_type = other DNA
atgcatcaccatcaccatcacggtggcagcaacatgtttgcgtattattcaagtctggaaaaccataccaatgccaagttcattagcaagatccgtggtgcaggcttcctgatgcacaccgtggaatgggtagctcgcgagaagattcatggaacgaactttagcgttatcattactccgaccgaaatcgtgccagccaaacgcacagggccgatcttggaagatgagagcttctttggtcatgaaattatcatgaaaaaatatatggactccttcgtgaaggtgcagaacatgctgaatgcgatggatcttgttagcgtgcaaatctttggcgaatttgcgggtggtggcattcagaaaggcgtcgattacggagacaaagatttctatgtgtttgacatcctgtctgatagcgggaacgagaaagtttactgggatgactatcgcgtcgaatcgttttgcaccactgtgggtctgaaattagcgcctctgctgggacgtggtagtttcgctgaactgtcccagtacccaaacgatttcaaaagcctggtgaaccgttataatgaattggttgacacggtcggcctggagatggccaataaacacgtctttggtccgcaagcgtcttctgaaactggcctgggggaaggctacgttcttaaacccgtctatccgcgcttctttaatgtgggtacgcgcgtggcgattaaatgcaagaactccaaattttcggagaaagccaaactgatttcgccaattaaagcgaaggttgaactgacggagaacgataaacgtctgctcggaatctttagcgaatatgttacctggaatcgcgtcagtaacgtactgtcacatattggctcagtgaccgccaaagattttgggcgtgtttcgggtctgacgatgaaagacatcattcgcgaagcagcacgcgaaggccatgatctgttgttcgctgataacccgtcggcggtgctgaaggagctgacaggcctcatccagaacacgattcgctccaaatggcacgaagttctggag

SEQ ID NO: 2592 - protein, 346 aa, synthetic construct
  REGION 1..346: note = variant of RNA ligase 2 from Klebsiella phage KP179
MHHHHHHGGSNMFAYYSSLENHTNAKFISKIRGAGFLMHTVEWVAREKIHGTNFSVIITPTEIVPAKRTGPILEDESFFGHEIIMKKYMDSFVKVQNMLNAMDLVSVQIFGEFAGGGIQKGVDYGDKDFYVFDILSDSGNEKVYWDDYRVESFCTTVGLKLAPLLGRGSFAELSQYPNDFKSLVNRYNELVDTVGLEMANKHVFGPQASSETGLGEGYVLKPVYPRFFNVGTRVAIKCKNSKFSEKAKLISPIKAKVELTENDKRLLGIFSEYVTWNRVSNVLSHIGSVTAKDFGRVSGLTMKDIIREAAREGHDLLFADNPSAVLKELTGLIQNTIRSKWHEVLE

SEQ ID NO: 2593 - DNA, 1038 bp, synthetic construct
  misc_feature 1..1038: note = variant of RNA ligase 2 from Klebsiella phage KP179
  source 1..1038: mol_type = other DNA
atgcatcaccatcaccatcacggtggcagcaacatgtttgcgtattattcaagtctggaaaaccataccaatgccaagttcattagcaagatccgtggtgcaggcttcctgatgcacaccgtggaatgggtagctcgcgagaagattcatggaacgaactttagcgttatcattactccgaccgaaatcgtgccagccaaacgcacagggccgatcttggaagatgagagcttctttggtcatgaaattatcatgaaaaaatatatggactccttcgtgaaggtgcagaacatgctgaatgcgatggatcttgttagcgtgcaaatctttggcgaatttgcgggtggtggcattcagaaaggcgtcgattacggagacaaagatttctatgtgtttgacatcctgtctgatagcgggaacgagaaagtttactgggatgactatcgcgtcgaatcgttttgcaccactgtgggtctgaaattagcgcctctgctgggacgtggtagtcatgctgaactgtcccagtacccaaacgatttcaaaagcctggtgaaccgttataatgaattggttgacacggtcggcctggagatggccaataaacacgtctttggtccgcaagcgtcttctgaaactggcctggcagaaggctacgttcttaaacccgtctatccgcgcttctttaatgtgggtacgcgcgtggcgattaaatgcaagaactccaaattttcggagaaagccaaactgatttcgccaattaaagcgaaggttgaactgacggagaacgataaacgtctgctcggaatctttagcgaatatgttacctggaatcgcgtcagtaacgtactgtcacatattggctcagtgaccgccaaagattttgggcgtgtttcgggtctgacgatgaaagacatcattcgcgaagcagcacgcgaaggccatgatctgttgttcgctgataacccgtcggcggtgctgaaggagctgacaggcctcatccagaacacgattcgctccaaatggcacgaagttctggag

SEQ ID NO: 2594 - protein, 346 aa, synthetic construct
  REGION 1..346: note = variant of RNA ligase 2 from Klebsiella phage KP179
MHHHHHHGGSNMFAYYSSLENHTNAKFISKIRGAGFLMHTVEWVAREKIHGTNFSVIITPTEIVPAKRTGPILEDESFFGHEIIMKKYMDSFVKVQNMLNAMDLVSVQIFGEFAGGGIQKGVDYGDKDFYVFDILSDSGNEKVYWDDYRVESFCTTVGLKLAPLLGRGSHAELSQYPNDFKSLVNRYNELVDTVGLEMANKHVFGPQASSETGLAEGYVLKPVYPRFFNVGTRVAIKCKNSKFSEKAKLISPIKAKVELTENDKRLLGIFSEYVTWNRVSNVLSHIGSVTAKDFGRVSGLTMKDIIREAAREGHDLLFADNPSAVLKELTGLIQNTIRSKWHEVLE

SEQ ID NO: 2595 - DNA, 1038 bp, synthetic construct
  misc_feature 1..1038: note = variant of RNA ligase 2 from Klebsiella phage KP179
  source 1..1038: mol_type = other DNA
atgcatcaccatcaccatcacggtggcagcaacatgtttgcgtattattcaagtctggaaaaccataccaatgccaagttcattagcaagatccgtggtgcaggcttcctgatgcacaccgtggaatgggtagctcgcgagaagattcatggaacgaactttagcgttatcattactccgaccgaaatcgtgccagccaaacgcacagggccgatcttggaagatgagagcttctttggtcatgaaattatcatgaaaaaatatatggactccttcgtgaaggtgcagaacatgctgaatgcgatggatcttgttagcgtgcaaatctttggcgaatttgcgggtggtggcattcagaaaggcgtcgattacggagacaaagatttctatgtgtttgacatcctgtctgatagcgggaacgagaaagtttactgggatgactatcgcgtcgaatcgttttgcaccactgtgggtctgaaattagcgcctctgctgggacgtggtagtttcgctgaactgtcccagtacccaaacgatttcaaaagcctggtgaaccgttataatgaattggttgacacggtcggcctggagatggccaataaacacgtctttggtccgcaagcgtcttctgaaactggcctggcagaaggctacgttcttaaacccgtctatccgcgcttctttaatgtgggtacgcgcgtggcgattaaatgcaagaactccaaattttcggagaaagccaaactgatttcgccaattaaagcgaaggttgaactgacggagaacgataaacgtctgctcggaatctttagcgaatatgttacctggaatcgcgtcagtaacgtactgtcacatattggctcagtgaccgccaaagattatgggcgtgtttcgggtctgacgatgaaagacatcattcgcgaagcagcacgcgaaggccatgatctgttgttcgctgataacccgtcggcggtgctgaaggagctgacaggcctcatccagaacacgattcgctccaaatggcacgaagttctggag

SEQ ID NO: 2596 - protein, 346 aa, synthetic construct
  REGION 1..346: note = variant of RNA ligase 2 from Klebsiella phage KP179
MHHHHHHGGSNMFAYYSSLENHTNAKFISKIRGAGFLMHTVEWVAREKIHGTNFSVIITPTEIVPAKRTGPILEDESFFGHEIIMKKYMDSFVKVQNMLNAMDLVSVQIFGEFAGGGIQKGVDYGDKDFYVFDILSDSGNEKVYWDDYRVESFCTTVGLKLAPLLGRGSFAELSQYPNDFKSLVNRYNELVDTVGLEMANKHVFGPQASSETGLAEGYVLKPVYPRFFNVGTRVAIKCKNSKFSEKAKLISPIKAKVELTENDKRLLGIFSEYVTWNRVSNVLSHIGSVTAKDYGRVSGLTMKDIIREAAREGHDLLFADNPSAVLKELTGLIQNTIRSKWHEVLE

SEQ ID NO: 2597 - DNA, 1038 bp, synthetic construct
  misc_feature 1..1038: note = variant of RNA ligase 2 from Klebsiella phage KP179
  source 1..1038: mol_type = other DNA
atgcatcaccatcaccatcacggtggcagcaacatgtttgcgtattattcaagtctggaaaaccataccaatgccaagttcattagcaagatccgtggtgcaggcttcctgatgcacaccgtggaatgggtagctcgcgagaagattcatggaacgaactttagcgttatcattactccgaccgaaatcgtgccagccaaacgcacagggccgatcttggaagatgagagcttctttggtcatgaaattatcatgaaaaaatatatggactccttcgtgaaggtgcagaacatgctgaatgcgatggatcttgttagcgtgcaaatctttggcgaatttgcgggtggtggcattcagaaaggcgtcgattacggagacaaagatttctatgtgtttgacatcctgtctgatagcgggaacgagaaagtttactgggatgactatcgcgtcgaatcgttttgcaccactgtgggttttaaattagcgcctctgctgggacgtggtagtttcgctgaactgtcccagtacccaaacgatttcaaaagcctggtgaaccgttataatgaattggttgacacggtcggcctggagatggccaataaacacgtctttggtccgcaagcgtcttctgaaactggcctggcagaaggctacgttcttaaacccgtctatccgcgcttctttaatgtgggtacgcgcgtggcgattaaatgcaagaactccaaattttcggagaaagccaaactgatttcgccaattaaagcgaaggttgaactgacggagaacgataaacgtctgctcggaatctttagcgaatatgttacctggaatcgcgtcagtaacgtactgtcacatattggctcagtgaccgccaaagattttgggcgtgtttcgggtctgacgatgaaagacatcattcgcgaagcagcacgcgaaggccatgatctgttgttcgctgataacccgtcggcggtgctgaaggagctgacaggcctcatccagaacacgattcgctccaaatggcacgaagttctggag

SEQ ID NO: 2598 - protein, 346 aa, synthetic construct
  REGION 1..346: note = variant of RNA ligase 2 from Klebsiella phage KP179
MHHHHHHGGSNMFAYYSSLENHTNAKFISKIRGAGFLMHTVEWVAREKIHGTNFSVIITPTEIVPAKRTGPILEDESFFGHEIIMKKYMDSFVKVQNMLNAMDLVSVQIFGEFAGGGIQKGVDYGDKDFYVFDILSDSGNEKVYWDDYRVESFCTTVGFKLAPLLGRGSFAELSQYPNDFKSLVNRYNELVDTVGLEMANKHVFGPQASSETGLAEGYVLKPVYPRFFNVGTRVAIKCKNSKFSEKAKLISPIKAKVELTENDKRLLGIFSEYVTWNRVSNVLSHIGSVTAKDFGRVSGLTMKDIIREAAREGHDLLFADNPSAVLKELTGLIQNTIRSKWHEVLE

SEQ ID NO: 2599 - DNA, 1038 bp, synthetic construct
  misc_feature 1..1038: note = variant of RNA ligase 2 from Klebsiella phage KP179
  source 1..1038: mol_type = other DNA
atgcatcaccatcaccatcacggtggcagcaacatgtttgcgtattattcaagtctggaaaaccataccaatgccaagttcattagcaagatccgtggtgcaggcttcctgatgcacaccgtggaatgggtagctcgcgagaagattcatggaacgaactttagcgttatcattactccgaccgaaatcgtgccagccaaacgcacagggccgatcttggaagatgagagcttctttggtcatgaaattatcatgaaaaaatatatggactccttcgtgaaggtgcagaacatgctgaatgcgatggatcttgttagcgtgcaaatctttggcgaatttgcgggtggtggcattcagaaaggcgtcgattacggagacaaagatttctatgtgtttgacatcctgtctgatagcgggaacgagaaagtttactgggatgactatcgcgtcgaatcgttttgcaccactgtgggtctgaaattagcgcctctgctgggacgtggtagtttcgctgaactgtcccagtacccaaacgatttcaaaagcctggtgaaccgttataatgaattggttgacacggtcggcctggagatggccaataaacacgtctttggtccgcaagcgtcttctgaaactggcctggcagaaggctacgttcttaaacccgtctatccgcgcttctttaatgtgggtacgcgcgtggcgattaaatgcaagaactccaaattttcggagaaagccaaactgatttcgccaattaaagcgaaggttgaactgacggagaacgataaacgtctgctcggaatctttagcgaatatgttacctggaatcgcgtcagtaacgtactgtcacatatgggctcagtgaccgccaaagattttgggcgtgtttcgggtctgacgatgaaagacatcattcgcgaagcagcacgcgaaggccatgatctgttgttcgctgataacccgtcggcggtgctgaaggagctgacaggcctcatccagaacacgattcgctccaaatggcacgaagttctggag

SEQ ID NO: 2600 - protein, 346 aa, synthetic construct
  REGION 1..346: note = variant of RNA ligase 2 from Klebsiella phage KP179
MHHHHHHGGSNMFAYYSSLENHTNAKFISKIRGAGFLMHTVEWVAREKIHGTNFSVIITPTEIVPAKRTGPILEDESFFGHEIIMKKYMDSFVKVQNMLNAMDLVSVQIFGEFAGGGIQKGVDYGDKDFYVFDILSDSGNEKVYWDDYRVESFCTTVGLKLAPLLGRGSFAELSQYPNDFKSLVNRYNELVDTVGLEMANKHVFGPQASSETGLAEGYVLKPVYPRFFNVGTRVAIKCKNSKFSEKAKLISPIKAKVELTENDKRLLGIFSEYVTWNRVSNVLSHMGSVTAKDFGRVSGLTMKDIIREAAREGHDLLFADNPSAVLKELTGLIQNTIRSKWHEVLE

SEQ ID NO: 2601 - DNA, 1038 bp, synthetic construct
  misc_feature 1..1038: note = variant of RNA ligase 2 from Klebsiella phage KP179
  source 1..1038: mol_type = other DNA
atgcatcaccatcaccatcacggtggcagcaacatgtttgcgtattattcaagtctggaaaaccataccaatgccaagttcattagcaagatccgtggtgcaggcttcctgatgcacaccgtggaatgggtagctcgcgagaagattcatggaacgaactttagcgttatcattactccgaccgaaatcgtgccagccaaacgcacagggccgatcttggaagatgagagcttctttggtcatgaaattatcatgaaaaaatatatggactccttcgtgaagattcagaacatgctgaatgcgatggatcttgttagcgtgcaaatctttggcgaatttgcgggtggtggcattcagaaaggcgtcgattacggagacaaagatttctatgtgtttgacatcctgtctgatagcgggaacgagaaagtttactgggatgactatcgcgtcgaatcgttttgcaccactgtgggtctgaaattagcgcctctgctgggacgtggtagtttcgctgaactgtcccagtacccaaacgatttcaaaagcctggtgaaccgttataatgaattggttgacacggtcggcctggagatggccaataaacacgtctttggtccgcaagcgtcttctgaaactggcctggcagaaggctacgttcttaaacccgtctatccgcgcttctttaatgtgggtacgcgcgtggcgattaaatgcaagaactccaaattttcggagaaagccaaactgatttcgccaattaaagcgaaggttgaactgacggagaacgataaacgtctgctcggaatctttagcgaatatgttacctggaatcgcgtcagtaacgtactgtcacatattggctcagtgaccgccaaagattttgggcgtgtttcgggtctgacgatgaaagacatcattcgcgaagcagcacgcgaaggccatgatctgttgttcgctgataacccgtcggcggtgctgaaggagctgacaggcctcatccagaacacgattcgctccaaatggcacgaagttctggag

SEQ ID NO: 2602 - protein, 346 aa, synthetic construct
  REGION 1..346: note = variant of RNA ligase 2 from Klebsiella phage KP179
MHHHHHHGGSNMFAYYSSLENHTNAKFISKIRGAGFLMHTVEWVAREKIHGTNFSVIITPTEIVPAKRTGPILEDESFFGHEIIMKKYMDSFVKIQNMLNAMDLVSVQIFGEFAGGGIQKGVDYGDKDFYVFDILSDSGNEKVYWDDYRVESFCTTVGLKLAPLLGRGSFAELSQYPNDFKSLVNRYNELVDTVGLEMANKHVFGPQASSETGLAEGYVLKPVYPRFFNVGTRVAIKCKNSKFSEKAKLISPIKAKVELTENDKRLLGIFSEYVTWNRVSNVLSHIGSVTAKDFGRVSGLTMKDIIREAAREGHDLLFADNPSAVLKELTGLIQNTIRSKWHEVLE

SEQ ID NO: 2603 - DNA, 1038 bp, synthetic construct
  misc_feature 1..1038: note = variant of RNA ligase 2 from Klebsiella phage KP179
  source 1..1038: mol_type = other DNA
atgcatcaccatcaccatcacggtggcagcaacatgtttgcgtattattcaagtctggaaaaccataccaatgccaagttcattagcaagatccgtggtgcaggcttcctgatgcacaccgtggaatgggtagctcgcgagaagattcatggaacgaactttagcgttatcattactccgaccgaaatcgtgccagccaaacgcacagggccgatcttggaagatgagagcttctttggtcatgaaattatcatgaaaaaatatatggactccttcgtgaaggtgcagaacatgctgaatgcgatggatcttgttagcgtgcaaatctttggcgaatttgcgggtggtggcattcagaaaggcgtcgattacggagacaaagatttctatgtgtttgacatcctgtctgatagcgggaacgagaaagtttactgggatgactatcgcgtcgaatcgttttgcaccactgtgggtctgaaattagcgcctctgctgggacgtggtagtttcgctgaactgtcccagtacccaaacgatttcaaaagcctggtgaaccgttataatgaattggttgacacggtcggcctggagatggccaataaacacgtctttggtccgcaagcgtcttctgaaactggcctggcagaaggctacgttcttaaacccgtctatccgcgcttctttaatgtgggtacgcgcgtggcgattaaatgcaagaactccaaattttcggagaaagccaaactgatttcgccaattaaagcgaaggttgaactgacggagaacgataaacgtctgctcggaatctttagcgaatatgttacctggaatcgcgtcagtaacgtactgtcacatattggctcagtgaccgccaaagattttgggcgtgtttcgggtctgacgatgaaagacatcattcgcgaagcagcacgcgaaggccatgatctgttgttcgctgataacccgtcggcggtgctgaaggagctgacaggcctcatccagaacacgattcgctccaaagctcacgaagttctggag

SEQ ID NO: 2604 - protein, 346 aa, synthetic construct
  REGION 1..346: note = variant of RNA ligase 2 from Klebsiella phage KP179
MHHHHHHGGSNMFAYYSSLENHTNAKFISKIRGAGFLMHTVEWVAREKIHGTNFSVIITPTEIVPAKRTGPILEDESFFGHEIIMKKYMDSFVKVQNMLNAMDLVSVQIFGEFAGGGIQKGVDYGDKDFYVFDILSDSGNEKVYWDDYRVESFCTTVGLKLAPLLGRGSFAELSQYPNDFKSLVNRYNELVDTVGLEMANKHVFGPQASSETGLAEGYVLKPVYPRFFNVGTRVAIKCKNSKFSEKAKLISPIKAKVELTENDKRLLGIFSEYVTWNRVSNVLSHIGSVTAKDFGRVSGLTMKDIIREAAREGHDLLFADNPSAVLKELTGLIQNTIRSKAHEVLE

SEQ ID NO: 2605 - DNA, 1038 bp, synthetic construct
  misc_feature 1..1038: note = variant of RNA ligase 2 from Klebsiella phage KP179
  source 1..1038: mol_type = other DNA
atgcatcaccatcaccatcacggtggcagcaacatgtttgcgtattattcaagtctggaaaaccataccaatgccaagttcattagcaagatccgtggtgcaggcttcctgatgcacaccgtggaatgggtagctcgcgagaagattcatggaacgaactttagcgttatcattactccgaccgaaatcgtgccagccaaacgcacagggccgatcttggaagatgagagcttctttggtcatgaaattatcatgaaaaaatatatggactccttcgtgaaggtgcagaacatgctgaatgcgatggatcttgttagcgtgcaaatctttggcgaatttgcgggtggtggcattcagaaaggcgtcgattacggagacaaagatttctatgtgtttgacatcctgtctgatagcgggaacgagaaagtttactgggatgactatcgcgtcgaatcgttttgcaccactgtgggtctgaaattagcgcctctgctgggacgtggtagtttcgctgaactgtcccagtacccaaacgatttcaaaagcctggtgaaccgttataatgaattggttgacacggtcggcctggagatggccaataaacacgtctttggtccgcaagcgtcttctgaaactggcctggcagaaggctacgttcttaaacccgtctatccgcgcttctttaatgtgggtacgcgcgtggcgattaaatgcaagaactccaaattttcggagaaagccaaactgatttcgccaattaaagcgaaggttgaactgacggagaacgataaacgtctgctcggaatctttagcgaatatgttacctggaatcgcgtcagtaacgtactgtcacatattggctcagtgaccgccaaagattttgggcgtgtttcgggtctgacgatgaaagacatcattcgcgaagcagcacgcgaaggccatgatctgttgttcgctgataacccgtcggcgctgctgaaggagctgacaggcctcatccagaacacgattcgctccaaatggcacgaagttctggag

SEQ ID NO: 2606 - protein, 346 aa, synthetic construct
  REGION 1..346: note = variant of RNA ligase 2 from Klebsiella phage KP179
MHHHHHHGGSNMFAYYSSLENHTNAKFISKIRGAGFLMHTVEWVAREKIHGTNFSVIITPTEIVPAKRTGPILEDESFFGHEIIMKKYMDSFVKVQNMLNAMDLVSVQIFGEFAGGGIQKGVDYGDKDFYVFDILSDSGNEKVYWDDYRVESFCTTVGLKLAPLLGRGSFAELSQYPNDFKSLVNRYNELVDTVGLEMANKHVFGPQASSETGLAEGYVLKPVYPRFFNVGTRVAIKCKNSKFSEKAKLISPIKAKVELTENDKRLLGIFSEYVTWNRVSNVLSHIGSVTAKDFGRVSGLTMKDIIREAAREGHDLLFADNPSALLKELTGLIQNTIRSKWHEVLE

SEQ ID NO: 2607 - DNA, 1038 bp, synthetic construct
  misc_feature 1..1038: note = variant of RNA ligase 2 from Klebsiella phage KP179
  source 1..1038: mol_type = other DNA
atgcatcaccatcaccatcacggtggcagcaacatgtttgcgtattattcaagtctggaaaaccataccaatgccaagttcattagcaagatccgtggtgcaggcttcctgatgcacaccgtggaatgggtagctcgcgagaagattcatggaacgaactttagcgttatcattactccgaccgaaatcgtgccagccaaacgcacagggccgatcttggaagatgagagcttctttggtcatgaaattatcatgaaaaaatatatggactccttcgtgaaggtgcagaacatgctgaatgcgatggatcttgttagcgtgcaaatctttggcgaatttgcgggtggtggcattcagaaaggcgtcgattacggagacaaagatttctatgtgtttgacatcctgtctgatagcgggaacgagaaagtttactgggatgactatcgcgtcgaatcgttttgcaccactgtgggtctgaaattagcgcctctgctgggacgtggtagtttcgctgaactgtcccagtacccaaacgatttcaaaagcctggtgaaccgttataatgaattggttgacacggtcggcctggagatggccaataaacacgtctttggtccgcaagcgtcttctgaaactggcaaggcagaaggctacgttcttaaacccgtctatccgcgcttctttaatgtgggtacgcgcgtggcgattaaatgcaagaactccaaattttcggagaaagccaaactgatttcgccaattaaagcgaaggttgaactgacggagaacgataaacgtctgctcggaatctttagcgaatatgttacctggaatcgcgtcagtaacgtactgtcacatattggctcagtgaccgccaaagattttgggcgtgtttcgggtctgacgatgaaagacatcattcgcgaagcagcacgcgaaggccatgatctgttgttcgctgataacccgtcggcggtgctgaaggagctgacaggcctcatccagaacacgattcgctccaaatggcacgaagttctggag

SEQ ID NO: 2608 - protein, 346 aa, synthetic construct
  REGION 1..346: note = variant of RNA ligase 2 from Klebsiella phage KP179
MHHHHHHGGSNMFAYYSSLENHTNAKFISKIRGAGFLMHTVEWVAREKIHGTNFSVIITPTEIVPAKRTGPILEDESFFGHEIIMKKYMDSFVKVQNMLNAMDLVSVQIFGEFAGGGIQKGVDYGDKDFYVFDILSDSGNEKVYWDDYRVESFCTTVGLKLAPLLGRGSFAELSQYPNDFKSLVNRYNELVDTVGLEMANKHVFGPQASSETGKAEGYVLKPVYPRFFNVGTRVAIKCKNSKFSEKAKLISPIKAKVELTENDKRLLGIFSEYVTWNRVSNVLSHIGSVTAKDFGRVSGLTMKDIIREAAREGHDLLFADNPSAVLKELTGLIQNTIRSKWHEVLE

SEQ ID NO: 2609 - DNA, 1038 bp, synthetic construct
  misc_feature 1..1038: note = variant of RNA ligase 2 from Klebsiella phage KP179
  source 1..1038: mol_type = other DNA
atgcatcaccatcaccatcacggtggcagcaacatgtttgcgtattattcaagtctggaaaaccataccaatgccaagttcattagcaagatccgtggtgcaggcttcctgatgcacaccgtggaatgggtagctcgcgagaagattcatggaacgaactttagcgttatcattactccgaccgaaatcgtgccagccaaacgcacagggccgatcttggaagatgagagcttctttggtcatgaaattatcatgaaaaaatatatggactccttcgtgaaggtgcagaacatgctgaatgcgatggatcttgttagcgtgcaaatctttggcgaatttgcgggtggtggcattcagaaaggcgtcgattacggagacaaagatttctatgtgtttgacatcctgtctgatagcgggaacgagaaagtttactgggatgactatcgcgtcgaatcgttttgcaccactgtgggtctgaaattagcgcctctgctgggacgtggtagtttcgctgaactgtcccagtacccaaacgatttcaaaagcctggtgaaccgttataatgaattggttgacacggtcggcctggagatggccaataaacacgtctttggtccgcaagcgtcttctgaaactggcctggcagaaggctacgttcttaaacccgtctatccgcgcttctttaatgtgggtacgcgcgtggcgattaaatgcaagaactccaaattttcggagaaagccaaactgatttcgccaattaaagcgaaggttgaactgacggagaacgataaacgtctgctcggaatctttagcgaatatgttacctggaatcgcgtcagtaacgtactgtcacatattggctcagtgaccgccaaagattttgggcgtgtttcgggtctgacgatgaaagacatcattcgcgaagcagcacgcgaaggccatgatctgttgttcgctgataacccgtcggcggtgctgaaggagctgacaggcctcatccagaacatgattcgctccaaatggcacgaagttctggag

SEQ ID NO: 2610 - protein, 346 aa, synthetic construct
  REGION 1..346: note = variant of RNA ligase 2 from Klebsiella phage KP179
MHHHHHHGGSNMFAYYSSLENHTNAKFISKIRGAGFLMHTVEWVAREKIHGTNFSVIITPTEIVPAKRTGPILEDESFFGHEIIMKKYMDSFVKVQNMLNAMDLVSVQIFGEFAGGGIQKGVDYGDKDFYVFDILSDSGNEKVYWDDYRVESFCTTVGLKLAPLLGRGSFAELSQYPNDFKSLVNRYNELVDTVGLEMANKHVFGPQASSETGLAEGYVLKPVYPRFFNVGTRVAIKCKNSKFSEKAKLISPIKAKVELTENDKRLLGIFSEYVTWNRVSNVLSHIGSVTAKDFGRVSGLTMKDIIREAAREGHDLLFADNPSAVLKELTGLIQNMIRSKWHEVLE

SEQ ID NO: 2611 - DNA, 1038 bp, synthetic construct
  misc_feature 1..1038: note = variant of RNA ligase 2 from Klebsiella phage KP179
  source 1..1038: mol_type = other DNA
atgcatcaccatcaccatcacggtggcagcaacatgtttgcgtattattcaagtctggaaaaccataccaatgccaagttcattagcaagatccgtggtgcaggcttcctgatgcacaccgtggaatgggtagctcgcgagaagattcatggaacgaactttagcgttatcattactccgaccgaaatcgtgccagccaaacgcacagggccgatcttggaagatgagagcttctttggtcatgaaattatcatgaaaaaatatatggacgttttcgtgaaggtgcagaacatgctgaatgcgatggatcttgttagcgtgcaaatctttggcgaatttgcgggtggtggcattcagaaaggcgtcgattacggagacaaagatttctatgtgtttgacatcctgtctgatagcgggaacgagaaagtttactgggatgactatcgcgtcgaatcgttttgcaccactgtgggtctgaaattagcgcctctgctgggacgtggtagtttcgctgaactgtcccagtacccaaacgatttcaaaagcctggtgaaccgttataatgaattggttgacacggtcggcctggagatggccaataaacacgtctttggtccgcaagcgtcttctgaaactggcctggcagaaggctacgttcttaaacccgtctatccgcgcttctttaatgtgggtacgcgcgtggcgattaaatgcaagaactccaaattttcggagaaagccaaactgatttcgccaattaaagcgaaggttgaactgacggagaacgataaacgtctgctcggaatctttagcgaatatgttacctggaatcgcgtcagtaacgtactgtcacatattggctcagtgaccgccaaagattttgggcgtgtttcgggtctgacgatgaaagacatcattcgcgaagcagcacgcgaaggccatgatctgttgttcgctgataacccgtcggcggtgctgaaggagctgacaggcctcatccagaacacgattcgctccaaatggcacgaagttctggag

SEQ ID NO: 2612 - protein, 346 aa, synthetic construct
  REGION 1..346: note = variant of RNA ligase 2 from Klebsiella phage KP179
MHHHHHHGGSNMFAYYSSLENHTNAKFISKIRGAGFLMHTVEWVAREKIHGTNFSVIITPTEIVPAKRTGPILEDESFFGHEIIMKKYMDVFVKVQNMLNAMDLVSVQIFGEFAGGGIQKGVDYGDKDFYVFDILSDSGNEKVYWDDYRVESFCTTVGLKLAPLLGRGSFAELSQYPNDFKSLVNRYNELVDTVGLEMANKHVFGPQASSETGLAEGYVLKPVYPRFFNVGTRVAIKCKNSKFSEKAKLISPIKAKVELTENDKRLLGIFSEYVTWNRVSNVLSHIGSVTAKDFGRVSGLTMKDIIREAAREGHDLLFADNPSAVLKELTGLIQNTIRSKWHEVLE

SEQ ID NO: 2613 - DNA, 1038 bp, synthetic construct
  misc_feature 1..1038: note = variant of RNA ligase 2 from Klebsiella phage KP179
  source 1..1038: mol_type = other DNA
atgcatcaccatcaccatcacggtggcagcaacatgtttgcgtattattcaagtctggaaaaccataccaatgccaagttcattagcaagatccgtggtgcaggcttcctgatgcacaccgtggaatgggtagctcgcgagaagattcatggaacgaactttagcgttatcattactccgaccgaaatcgtgccagccaaacgcacagggccgatcttggaagatgagagcttctttggtcatgaaattatcatgaaaaaatatatggactccttcgtgaaggtgcagaacatgctgaatgcgatggatcttgttagcgtgcaaatctttggcgaatttgcgggtggtggcattcagaaaggcgtcgattacggagacaaagatttctatgtgtttgacatcctgtctgatagcgggaacgagaaagtttactgggatgactatcgcgtcgaatcgttttgcaccactgtgggtctgaaattagcgcctctgctgggacgtggtagtttcgctgaactgtcccagtacccaaacgatttcaaaagcctggtgaaccgttataatgaattggttgacacggtcggcctggagatggccaataaacacgtctttggtccgcaagcgtcttctgaaactggcctggcagaaggctacgttcttaaacccgtctatccgcgcttctttaatgtgggtacgcgcgtggcgattaaatgcaagaactccaaattttcggagaaagccaaactgatttcgccaattaaagcgaaggttgaactgacggagaacgataaacgtctgctcggaatctttagcgaatatgttacctggaatcgcgtcagtaacgtactgtcacatattggctcagtgaccgccaaagattttgggcgtgtttcgggtctgacgatgaaagacatcattcgcgaagcagcacgcgaaggccatgatctgttgttcgctgataacccgtcggcggtgctgaaggagctgacaggcctcatccagaacacggcgcgctccaaatggcacgaagttctggag

SEQ ID NO: 2614 - protein, 346 aa, synthetic construct
  REGION 1..346: note = variant of RNA ligase 2 from Klebsiella phage KP179
MHHHHHHGGSNMFAYYSSLENHTNAKFISKIRGAGFLMHTVEWVAREKIHGTNFSVIITPTEIVPAKRTGPILEDESFFGHEIIMKKYMDSFVKVQNMLNAMDLVSVQIFGEFAGGGIQKGVDYGDKDFYVFDILSDSGNEKVYWDDYRVESFCTTVGLKLAPLLGRGSFAELSQYPNDFKSLVNRYNELVDTVGLEMANKHVFGPQASSETGLAEGYVLKPVYPRFFNVGTRVAIKCKNSKFSEKAKLISPIKAKVELTENDKRLLGIFSEYVTWNRVSNVLSHIGSVTAKDFGRVSGLTMKDIIREAAREGHDLLFADNPSAVLKELTGLIQNTARSKWHEVLE

SEQ ID NO: 2615 - DNA, 1038 bp, synthetic construct
  misc_feature 1..1038: note = variant of RNA ligase 2 from Klebsiella phage KP179
  source 1..1038: mol_type = other DNA
atgcatcaccatcaccatcacggtggcagcaacatgtttgcgtattattcaagtctggaaaaccataccaatgccaagttcattagcaagatccgtggtgcaggcttcctgatgcacaccgtggaatgggtagctcgcgagaagattcatggaacgaactttagcgttatcattactccgaccgaaatcgtgccagccaaacgcacagggccgatcttggaagatgagagcttctttggtcatgaaattatcatgaaaaaatatatggactccttcgtgaaggtgcagaacatgctgaatgcgatggatcttgttagcgtgcaaatctttggcgaatttgcgggtggtggcattcagaaaggcgtcgattacggagacaaagatttctatgtgtttgacatcctgtctgatagcgggaacgagaaagtttactgggatgactatcgcgtcgaatcgttttgcaccactgtgggtctgaaattagcgcctctgctgggacgtggtagtttcgctgaactgtcccagtacccaaacgatttcaaaagcctggtgacgcgttataatgaattggttgacacggtcggcctggagatggccaataaacacgtctttggtccgcaagcgtcttctgaaactggcctggcagaaggctacgttcttaaacccgtctatccgcgcttctttaatgtgggtacgcgcgtggcgattaaatgcaagaactccaaattttcggagaaagccaaactgatttcgccaattaaagcgaaggttgaactgacggagaacgataaacgtctgctcggaatctttagcgaatatgttacctggaatcgcgtcagtaacgtactgtcacatattggctcagtgaccgccaaagattttgggcgtgtttcgggtctgacgatgaaagacatcattcgcgaagcagcacgcgaaggccatgatctgttgttcgctgataacccgtcggcggtgctgaaggagctgacaggcctcatccagaacacgattcgctccaaatggcacgaagttctggag

SEQ ID NO: 2616 - protein, 346 aa, synthetic construct
  REGION 1..346: note = variant of RNA ligase 2 from Klebsiella phage KP179
MHHHHHHGGSNMFAYYSSLENHTNAKFISKIRGAGFLMHTVEWVAREKIHGTNFSVIITPTEIVPAKRTGPILEDESFFGHEIIMKKYMDSFVKVQNMLNAMDLVSVQIFGEFAGGGIQKGVDYGDKDFYVFDILSDSGNEKVYWDDYRVESFCTTVGLKLAPLLGRGSFAELSQYPNDFKSLVTRYNELVDTVGLEMANKHVFGPQASSETGLAEGYVLKPVYPRFFNVGTRVAIKCKNSKFSEKAKLISPIKAKVELTENDKRLLGIFSEYVTWNRVSNVLSHIGSVTAKDFGRVSGLTMKDIIREAAREGHDLLFADNPSAVLKELTGLIQNTIRSKWHEVLE

SEQ ID NO: 2617 - DNA, 1038 bp, synthetic construct
  misc_feature 1..1038: note = variant of RNA ligase 2 from Klebsiella phage KP179
  source 1..1038: mol_type = other DNA
atgcatcaccatcaccatcacggtggcagcaacatgtttgcgtattattcaagtctggaaaaccataccaatgccaagttcattagcaagatccgtggtgcaggcttcctgatgcacaccgtggaatgggtagctcgcgagaagattcatggaacgaactttagcgttatcattactccgaccgaaatcgtgccagccaaacgcacagggccgatcttggaagatgagagcttctttggtcatgaaattatcatgaaaaaatatatggactccttcgtgaaggtgcagaacatgctgaatgcgatggatcttgttagcgtgcaaatctttggcgaatttgcgggtggtggcattcagaaaggcgtcgattacggagacaaagatttctatgtgtttgacatcctgtctgatagcgggaacgagaaagtttactgggatgactatcgcgtcgaatcgttttgcaccactgtgggtctgaaattagcgcctctgctgggacgtggtagtttcgctgaactgtcccagtacccaaacgatttcaaaagcctggtgtctcgttataatgaattggttgacacggtcggcctggagatggccaataaacacgtctttggtccgcaagcgtcttctgaaactggcctggcagaaggctacgttcttaaacccgtctatccgcgcttctttaatgtgggtacgcgcgtggcgattaaatgcaagaactccaaattttcggagaaagccaaactgatttcgccaattaaagcgaaggttgaactgacggagaacgataaacgtctgctcggaatctttagcgaatatgttacctggaatcgcgtcagtaacgtactgtcacatattggctcagtgaccgccaaagattttgggcgtgtttcgggtctgacgatgaaagacatcattcgcgaagcagcacgcgaaggccatgatctgttgttcgctgataacccgtcggcggtgctgaaggagctgacaggcctcatccagaacacgattcgctccaaatggcacgaagttctggag

SEQ ID NO: 2618 - protein, 346 aa, synthetic construct
  REGION 1..346: note = variant of RNA ligase 2 from Klebsiella phage KP179
MHHHHHHGGSNMFAYYSSLENHTNAKFISKIRGAGFLMHTVEWVAREKIHGTNFSVIITPTEIVPAKRTGPILEDESFFGHEIIMKKYMDSFVKVQNMLNAMDLVSVQIFGEFAGGGIQKGVDYGDKDFYVFDILSDSGNEKVYWDDYRVESFCTTVGLKLAPLLGRGSFAELSQYPNDFKSLVSRYNELVDTVGLEMANKHVFGPQASSETGLAEGYVLKPVYPRFFNVGTRVAIKCKNSKFSEKAKLISPIKAKVELTENDKRLLGIFSEYVTWNRVSNVLSHIGSVTAKDFGRVSGLTMKDIIREAAREGHDLLFADNPSAVLKELTGLIQNTIRSKWHEVLE

SEQ ID NO: 2619 - DNA, 1038 bp, synthetic construct
  misc_feature 1..1038: note = variant of RNA ligase 2 from Klebsiella phage KP179
  source 1..1038: mol_type = other DNA
atgcatcaccatcaccatcacggtggcagcaacatgtttgcgtattattcaagtctggaaaaccataccaatgccaagttcattagcaagatccgtggtgcaggcttcctgatgcacaccgtggaatgggtagctcgcgagaagattcatggaacgaactttagcgttatcattactccgaccgaaatcgtgccagccaaacgcacagggccgatcttggaagatgagagcttctttggtcatgaaattatcatgaaaaaatatatggactccttcgtgaaggtgcagaacatgctgaatgcgatggatcttgttagcgtgcaaatctttggcgaatttgcgggtggtggcattcagaaaggcgtcgattacggagacaaagatttctatgtgtttgacatcctgtctgatagcgggaacgagaaagtttactgggatgactatcgcgtcgaatcgttttgcaccactgtgggtctgaaattagcgcctctgctgggacgtggtagtttcgctgaactgtcccagtacccaaacgatttcaaaagcctggtggttcgttataatgaattggttgacacggtcggcctggagatggccaataaacacgtctttggtccgcaagcgtcttctgaaactggcctggcagaaggctacgttcttaaacccgtctatccgcgcttctttaatgtgggtacgcgcgtggcgattaaatgcaagaactccaaattttcggagaaagccaaactgatttcgccaattaaagcgaaggttgaactgacggagaacgataaacgtctgctcggaatctttagcgaatatgttacctggaatcgcgtcagtaacgtactgtcacatattggctcagtgaccgccaaagattttgggcgtgtttcgggtctgacgatgaaagacatcattcgcgaagcagcacgcgaaggccatgatctgttgttcgctgataacccgtcggcggtgctgaaggagctgacaggcctcatccagaacacgattcgctccaaatggcacgaagttctggag

SEQ ID NO: 2620 - protein, 346 aa, synthetic construct
  REGION 1..346: note = variant of RNA ligase 2 from Klebsiella phage KP179
MHHHHHHGGSNMFAYYSSLENHTNAKFISKIRGAGFLMHTVEWVAREKIHGTNFSVIITPTEIVPAKRTGPILEDESFFGHEIIMKKYMDSFVKVQNMLNAMDLVSVQIFGEFAGGGIQKGVDYGDKDFYVFDILSDSGNEKVYWDDYRVESFCTTVGLKLAPLLGRGSFAELSQYPNDFKSLVVRYNELVDTVGLEMANKHVFGPQASSETGLAEGYVLKPVYPRFFNVGTRVAIKCKNSKFSEKAKLISPIKAKVELTENDKRLLGIFSEYVTWNRVSNVLSHIGSVTAKDFGRVSGLTMKDIIREAAREGHDLLFADNPSAVLKELTGLIQNTIRSKWHEVLE

SEQ ID NO: 2621 - DNA, 1038 bp, synthetic construct
  misc_feature 1..1038: note = variant of RNA ligase 2 from Klebsiella phage KP179
  source 1..1038: mol_type = other DNA
atgcatcaccatcaccatcacggtggcagcaacatgtttgcgtattattcaagtctggaaaaccataccaatgccaagttcattagcaagatccgtggtgcaggcttcctgagccacaccgtggaatgggtagctcgcgagaagattcatggaacgaactttagcgttatcattactccgaccgaaatcgtgccggccaaacgcacagggccgatcttggaagacgagagcttctttggtcatgaagcggttatgaaaaaatatatggactccttcaaaaaggtgcagaacatgctgaatgcgatggatcttgttagcgtgcaaatctttggcgaatttgcgggtggtggcattcagaaaggcgtcgattacggcgacaaagatttctatgtgtttgacatcctgtctgatagcgggaacgagaaagtttactgggatgactatcgcgtcgaatcgttttgcaccactgtgggtctgaaattagcgcctctgctgggacgtggtagtttcgctgaactgtcccagtacccaaacgatttcaaaagcctggtgaaccgttataatgaattggttgatacggtcggcctggagatggccaataaacacgtctttggtccgcaagcgtcttctgaaactggcctggcagaaggctacgttcttaaacccgtctatccgcgcttctttaatgtgggtacgcgcgtggcgattaaatgcaagaactccaaattttcggagaaagcctttctgattgaaccaattaaagcgaaggttgaactgacggagaacgataaacgtctgctcggaatctttagcgaatatgttacctggaaccgcgtcagtaacgtactgtcacatattggctcagtgaccgccaaagattttgggcgtgtttcgggtctgacgatgaaagacatcattcgcgaagcagcacgcgaaggccatgatctgttgttcgctgataacccgtcggcggtgctgaaggagctggaaggcctcatccagaacacgattcgctccaaatggcacgaagttctggag

SEQ ID NO: 2622 - protein, 346 aa, synthetic construct
  REGION 1..346: note = variant of RNA ligase 2 from Klebsiella phage KP179
MHHHHHHGGSNMFAYYSSLENHTNAKFISKIRGAGFLSHTVEWVAREKIHGTNFSVIITPTEIVPAKRTGPILEDESFFGHEAVMKKYMDSFKKVQNMLNAMDLVSVQIFGEFAGGGIQKGVDYGDKDFYVFDILSDSGNEKVYWDDYRVESFCTTVGLKLAPLLGRGSFAELSQYPNDFKSLVNRYNELVDTVGLEMANKHVFGPQASSETGLAEGYVLKPVYPRFFNVGTRVAIKCKNSKFSEKAFLIEPIKAKVELTENDKRLLGIFSEYVTWNRVSNVLSHIGSVTAKDFGRVSGLTMKDIIREAAREGHDLLFADNPSAVLKELEGLIQNTIRSKWHEVLE

SEQ ID NO: 2623 - DNA, 1038 bp, synthetic construct
  misc_feature 1..1038: note = variant of RNA ligase 2 from Klebsiella phage KP179
  source 1..1038: mol_type = other DNA
atgcatcaccatcaccatcacggtggcagcaacatgtttgcgtattattcaagtctggaaaaccataccaatgccaagttcattagcaagatccgtggtgcaggcttcctgagccacaccgtggaatgggtagctcgcgagaagattcatggaacgaactttagcgttatcattactccgaccgaaatcgtgccggccaaacgcacagggccgatcttggaagacgagagcttctttggtcatgaaattatcatgaaaaaatatatggacgcgttcaaaaaggtgcagaacatgctgaatgcgatggatcttgttagcgtgcaaatctttggcgaatttgcgggtggtggcattcagaaaggcgtcgattacggcgacaaagatttctatgtgtttgacatcctgtctgatagcgggaacgagaaagtttactgggatgactatcgcgtcgaatcgttttgcaccactgtgggtctgaaattagcgcctctgctgggacgtggtagtttcgctgaactgtcccagtacccaaacgatttcaaaagcctggtgaaccgttataatgaattggttgatacggtcggcctggagatggccaataaacacgtctttggtccgcaagcgtcttctgaaactggcctggcagaaggctacgttcttaaacccgtctatccgcgcttctttaatgtgggtacgcgcgtggcgattaaatgcaagaactccaaattttcggagaaagcctttctgattgaaccaattaaagcgaaggttgaactgacggagaacgataaacgtctgctcggaatcttaagcgaatatgttacctggaaccgcgtcagtaacgtactgtcacatattggctcagtggatgccaaagattttgggcgtgtttcgggtctgacgatgaaagacatcattcgcgaagcagcacgcgaaggccatgatctgttgttcgctgataacccgtcggcggtgctgaaggagctgacaggcctcatccagaacacgattcgctccaaatggcacgaagttctggag

SEQ ID NO: 2624 - protein, 346 aa, synthetic construct
  REGION 1..346: note = variant of RNA ligase 2 from Klebsiella phage KP179
MHHHHHHGGSNMFAYYSSLENHTNAKFISKIRGAGFLSHTVEWVAREKIHGTNFSVIITPTEIVPAKRTGPILEDESFFGHEIIMKKYMDAFKKVQNMLNAMDLVSVQIFGEFAGGGIQKGVDYGDKDFYVFDILSDSGNEKVYWDDYRVESFCTTVGLKLAPLLGRGSFAELSQYPNDFKSLVNRYNELVDTVGLEMANKHVFGPQASSETGLAEGYVLKPVYPRFFNVGTRVAIKCKNSKFSEKAFLIEPIKAKVELTENDKRLLGILSEYVTWNRVSNVLSHIGSVDAKDFGRVSGLTMKDIIREAAREGHDLLFADNPSAVLKELTGLIQNTIRSKWHEVLE

SEQ ID NO: 2625 - DNA, 1038 bp, synthetic construct
  misc_feature 1..1038: note = variant of RNA ligase 2 from Klebsiella phage KP179
  source 1..1038: mol_type = other DNA
atgcatcaccatcaccatcacggtggcagcaacatgtttgcgtattattcaagtctggaaaaccataccaatgccaagttcattagcaagatccgtggtgcaggcttcctgagccacaccgtggaatgggtagctcgcgagaagattcatggaacgaactttagcgttatcattactccgaccgaaatcgtgccggccaaacgcacagggccgatcttggaagacgagagcttctttggtcatgaagcgattatgaaaaaatatatggactccttcaaaaaggtgcagaacatgctgaatgcgatggatcttgttagcgtgcaaatctttggcgaatttgcgggtggtggcattcagaaaggcgtcgattacggagacaaagatttctatgtgtttgacatcctgtctgatagcgggaacgagaaagtttactgggatgactatcgcgtcgaatcgttttgcaccactgtgggtctgaaattagcgcctctgctgggacgtggtagtttcgctgaactgtcccagtacccaaacgatttccctagcctggtgaaccgttataatgaattggttgatacggtcggcctggagatggccaataaacacgtctttggtccgcaagcgtcttctgaaactggcctggcagaaggctacgttcttaaacccgtctatccgcgcttctttaatgtgggtacgcgcgtggcgattaaatgcaagaactccaaattttcggagaaagcctttctgattgaaccaattaaagcgaaggttgaactgacggagaacgataaacgtctgctcggaatctttagcgaatatgttacctggaaccgcgtcagtaacgtactgtcacatattggctcagtgaccgccaaagattttgggcgtgtttcgggtctgacgatgaaagacatcattcgcgaagcagcacgcgaaggccatgatctgttgttcgctgataacccgtcggcggtgctgaaggagctgacaggcctcatccagaacacgattcgctccaaatggcacgaagttctggag

SEQ ID NO: 2626 - protein, 346 aa, synthetic construct
  REGION 1..346: note = variant of RNA ligase 2 from Klebsiella phage KP179
MHHHHHHGGSNMFAYYSSLENHTNAKFISKIRGAGFLSHTVEWVAREKIHGTNFSVIITPTEIVPAKRTGPILEDESFFGHEAIMKKYMDSFKKVQNMLNAMDLVSVQIFGEFAGGGIQKGVDYGDKDFYVFDILSDSGNEKVYWDDYRVESFCTTVGLKLAPLLGRGSFAELSQYPNDFPSLVNRYNELVDTVGLEMANKHVFGPQASSETGLAEGYVLKPVYPRFFNVGTRVAIKCKNSKFSEKAFLIEPIKAKVELTENDKRLLGIFSEYVTWNRVSNVLSHIGSVTAKDFGRVSGLTMKDIIREAAREGHDLLFADNPSAVLKELTGLIQNTIRSKWHEVLE

SEQ ID NO: 2627 - DNA, 1038 bp, synthetic construct
  misc_feature 1..1038: note = variant of RNA ligase 2 from Klebsiella phage KP179
  source 1..1038: mol_type = other DNA
atgcatcaccatcaccatcacggtggcagcaacatgtttgcgtattattcaagtctggaaaaccataccaatgccaagttcattagcaagatccgtggtgcaggcttcctgagccacaccgtggaatgggtagctcgcgagaagattcatggaacgaactttagcgttatcattactccgaccgaaatcgtgccggccaaacgcacagggccgatcttggaagacgagagcttctttggtcatgaaattatcatgaaaaaatatatggactcgttcaaaaaggtgcagaacatgctgaatgcgatggatcttgttagcgtgcaaatctttggcgaatttgcgggtggtggcattcagaaaggcgtcgattacggagacaaagatttctatgtgtttgacatcctgtctgatagcgggaacgagaaagtttactgggatgactatcgcgtcgaatcgttttgcaccactgtgggtctgaaagtggcgcctctgctgggacgtggtagtttcgctgaactgtcccagtacccaaacgatttcaaaagcctggtgaaccgttataatgaattggttgatacggtcggcctggagatggccaataaacacgtctttggtccgcaagcgtcttctgaaactggcctggcagaaggctacgttcttaaacccgtctatccgcgcttctttaatgtgggtacgcgcgtggcgattaaatgcaagaactccaaattttcggagaaagcctttctgattgaaccaattaaagcgaaggttgaactgacggagaacgataaacgtctgctcggaatctttagcgaatatgttacctggaaccgcgtcagtaacgtactgtcacatattggctcagtggatgccaaagattttgggcgtgtttcgggtctgacgatgaaagacatcattcgcgaagcagcacgcgaaggccatgatctgttgttcgctgataacccgtcggcggtgctgaaggagctggaaggcctcatccagaacacgattcgctccaaatggcacgaagttctggag

SEQ ID NO: 2628 - protein, 346 aa, synthetic construct
  REGION 1..346: note = variant of RNA ligase 2 from Klebsiella phage KP179
MHHHHHHGGSNMFAYYSSLENHTNAKFISKIRGAGFLSHTVEWVAREKIHGTNFSVIITPTEIVPAKRTGPILEDESFFGHEIIMKKYMDSFKKVQNMLNAMDLVSVQIFGEFAGGGIQKGVDYGDKDFYVFDILSDSGNEKVYWDDYRVESFCTTVGLKVAPLLGRGSFAELSQYPNDFKSLVNRYNELVDTVGLEMANKHVFGPQASSETGLAEGYVLKPVYPRFFNVGTRVAIKCKNSKFSEKAFLIEPIKAKVELTENDKRLLGIFSEYVTWNRVSNVLSHIGSVDAKDFGRVSGLTMKDIIREAAREGHDLLFADNPSAVLKELEGLIQNTIRSKWHEVLE

SEQ ID NO: 2629 - DNA, 1038 bp, synthetic construct
  misc_feature 1..1038: note = variant of RNA ligase 2 from Klebsiella phage KP179
  source 1..1038: mol_type = other DNA
atgcatcaccatcaccatcacggtggcagcaacatgtttgcgtattattcaagtctggaaaaccataccaatgccaagttcattagcaagatccgtggtgcaggcttcctgagccacaccgtggaatgggtagctcgcgagaagattcatggaacgaactttagcgttatcattactccgaccgaaatcgtgccggccaaacgcacagggccgatcttggaagacgagagcttctttggtcatgaaattatcatgaaaaaatatatggactccttcaaaaaggtgcagaacatgctgaatgcgatggatcttgttagcgtgcaaatctttggcgaatttgcgggtggtggcattcagaaaggcgtcgattacggagacaaagatttctatgtgtttgacatcctgtctgatagcgggaacgagaaagtttactgggatgactatcgcgtcgaatcgttttgcaccactgtgggtctgaaattagcgcctctgctgggacgtggtagtttcgctgaactgtcccagtacccaaacgatttccgtagcctggtgaaccgttataatgaattggttgatacggtcggcctggagatggccaataaacacgtctttggtccgcaagcgtcttctgaaactggcctggcagaaggctacgttcttaaacccgtctatccgcgcttctttaatgtgggtacgcgcgtggcgattaaatgcaagaactccaaattttcggagaaagcctttctgattgaaccaattaaagcgaaggttgaactgacggagaacgataaacgtctgctcggaatctttagcgaatatgttacctggaaccgcgtcagtaacgtactgtcacatattggctcagtgaccgccaaagattttgggcgtgtttcgggtctgacgatgaaagacatcattcgcgaagcagcacgcgaaggccatgatctgttgttcgctgataacccgtcggcggtgctgaaggagctggaaggcctcatccagaacacgattcgctccaaatggcacgaagttctggag

SEQ ID NO: 2630 - protein, 346 aa, synthetic construct
  REGION 1..346: note = variant of RNA ligase 2 from Klebsiella phage KP179
MHHHHHHGGSNMFAYYSSLENHTNAKFISKIRGAGFLSHTVEWVAREKIHGTNFSVIITPTEIVPAKRTGPILEDESFFGHEIIMKKYMDSFKKVQNMLNAMDLVSVQIFGEFAGGGIQKGVDYGDKDFYVFDILSDSGNEKVYWDDYRVESFCTTVGLKLAPLLGRGSFAELSQYPNDFRSLVNRYNELVDTVGLEMANKHVFGPQASSETGLAEGYVLKPVYPRFFNVGTRVAIKCKNSKFSEKAFLIEPIKAKVELTENDKRLLGIFSEYVTWNRVSNVLSHIGSVTAKDFGRVSGLTMKDIIREAAREGHDLLFADNPSAVLKELEGLIQNTIRSKWHEVLE

SEQ ID NO: 2631 - DNA, 1038 bp, synthetic construct
  misc_feature 1..1038: note = variant of RNA ligase 2 from Klebsiella phage KP179
  source 1..1038: mol_type = other DNA
atgcatcaccatcaccatcacggtggcagcaacatgtttgcgtattattcaagtctggaaaaccataccaatgccaagttcattagcaagatccgtggtgcaggcttcctgagccacaccgtggaatgggtagctcgcgagaagattcatggaacgaactttagcgttatcattactccgaccgaaatcgtgccggccaaacgcacagggccgatcttggaagacgagagcttctttggtcatgaaattatcatgaaaaaatatatggactcgttcaaaaaggtgcagaacatgctgaatgcgatggatcttgttagcgtgcaaatctttggcgaatttgcgggtggtggcattcagaaaggcgtcgattacggagacaaagatttctatgtgtttgacatcctgtctgatagcgggaacgagaaagtttactgggatgactatcgcgtcgaatcgttttgcaccactgtgggtctgaaagtggcgcctctgctgggacgtggtagtttcgctgaactgtcccagtacccaaacgatttcaaaagcctggtgaaccgttataatgaattggttgatacggtcggcctggagatggccaataaacacgtctttggtccgcaagcgtcttctgaaactggcctggcagaaggctacgttcttaaacccgtctatccgcgcttctttaatgtgggtacgcgcgtggcgattaaatgcaagaactccaaattttcggagaaagcctttctgattgaaccaattaaagcgaaggttgaactgacggagaacgataaacgtctgctcggaatcttaagcgaatatgttacctggaaccgcgtcagtaacgtactgtcacatattggctcagtgaccgccaaagattttgggcgtgtttcgggtctgacgatgaaagacatcattcgcgaagcagcacgcgaaggccatgatctgttgttcgctgataacccgtcggcggtgctgaaggagctggaaggcctcatccagaacacgattcgctccaaatggcacgaagttctggag

SEQ ID NO: 2632 - protein, 346 aa, synthetic construct
  REGION 1..346: note = variant of RNA ligase 2 from Klebsiella phage KP179
MHHHHHHGGSNMFAYYSSLENHTNAKFISKIRGAGFLSHTVEWVAREKIHGTNFSVIITPTEIVPAKRTGPILEDESFFGHEIIMKKYMDSFKKVQNMLNAMDLVSVQIFGEFAGGGIQKGVDYGDKDFYVFDILSDSGNEKVYWDDYRVESFCTTVGLKVAPLLGRGSFAELSQYPNDFKSLVNRYNELVDTVGLEMANKHVFGPQASSETGLAEGYVLKPVYPRFFNVGTRVAIKCKNSKFSEKAFLIEPIKAKVELTENDKRLLGILSEYVTWNRVSNVLSHIGSVTAKDFGRVSGLTMKDIIREAAREGHDLLFADNPSAVLKELEGLIQNTIRSKWHEVLE

SEQ ID NO: 2633 - DNA, 1038 bp, synthetic construct
  misc_feature 1..1038: note = variant of RNA ligase 2 from Klebsiella phage KP179
  source 1..1038: mol_type = other DNA
atgcatcaccatcaccatcacggtggcagcaacatgtttgcgtattattcaagtctggaaaaccataccaatgccaagttcattagcaagatccgtggtgcaggcttcctgagccacaccgtggaatgggtagctcgcgagaagattcatggaacgaactttagcgttatcattactccgaccgaaatcgtgccggccaaacgcacagggccgatcttggaagacgagagcttctttggtcatgaaattatcatgaaaaaatatatggactcgttcaaaaaggtgcagaacatgctgaatgcgatggatcttgttagcgtgcaaatctttggcgaatttgcgggtggtggcattcagaaaggcgtcgattacggagacaaagatttctatgtgtttgacatcctgtctgatagcgggaacgagaaagtttactgggatgactatcgcgtcgaatcgttttgcaccactgtgggtctgaaaatggcgcctctgctgggacgtggtagtttcgctgaactgtcccagtacccaaacgatttcaaaagcctggtgaaccgttataatgaattggttgatacggtcggcctggagatggccaataaacacgtctttggtccgcaagcgtcttctgaaactggcctggcagaaggctacgttcttaaacccgtctatccgcgcttctttaatgtgggtacgcgcgtggcgattaaatgcaagaactccaaattttcggagaaagcctttctgattgaaccaattaaagcgaaggttgaactgacggagaacgataaacgtctgctcggaatcttaagcgaatatgttacctggaaccgcgtcagtaacgtactgtcacatattggctcagtgaccgccaaagattttgggcgtgtttcgggtctgacgatgaaagacatcattcgcgaagcagcacgcgaaggccatgatctgttgttcgctgataacccgtcggcggtgctgaaggagctggaaggcctcatccagaacacgattcgctccaaatggcacgaagttctggag

SEQ ID NO: 2634 - protein, 346 aa, synthetic construct
  REGION 1..346: note = variant of RNA ligase 2 from Klebsiella phage KP179
MHHHHHHGGSNMFAYYSSLENHTNAKFISKIRGAGFLSHTVEWVAREKIHGTNFSVIITPTEIVPAKRTGPILEDESFFGHEIIMKKYMDSFKKVQNMLNAMDLVSVQIFGEFAGGGIQKGVDYGDKDFYVFDILSDSGNEKVYWDDYRVESFCTTVGLKMAPLLGRGSFAELSQYPNDFKSLVNRYNELVDTVGLEMANKHVFGPQASSETGLAEGYVLKPVYPRFFNVGTRVAIKCKNSKFSEKAFLIEPIKAKVELTENDKRLLGILSEYVTWNRVSNVLSHIGSVTAKDFGRVSGLTMKDIIREAAREGHDLLFADNPSAVLKELEGLIQNTIRSKWHEVLE

SEQ ID NO: 2635 - DNA, 1038 bp, synthetic construct
  misc_feature 1..1038: note = variant of RNA ligase 2 from Klebsiella phage KP179
  source 1..1038: mol_type = other DNA
atgcatcaccatcaccatcacggtggcagcaacatgtttgcgtattattcaagtctggaaaaccataccaatgccaagttcattagcaagatccgtggtgcaggcttcctgagccacaccgtggaatgggtagctcgcgagaagattcatggaacgaactttagcgttatcattactccgaccgaaatcgtgccggccaaacgcacagggccgatcttggaagacgagagcttctttggtcatgaaattatcatgaaaaaatatatggactcgttcaaaaaggtgcagaacatgctgaatgcgatggatcttgttagcgtgcaaatctttggcgaatttgcgggtggtggcattcagaaaggcgtcgattacggagacaaagatttctatgtgtttgacatcctgtctgatagcgggaacgagaaagtttactgggatgactatcgcgtcgaatcgttttgcaccactgtgggtctgaaattagcgcctctgctgggacgtggtagtttcgctgaactgtcccagtacccaaacgatttcaaaagcctggtgaaccgttataatgaattggttgatacggtcggcctggagatggccaataaacacgtctttggtccgcaagcgtcttctgaaactggcctggcagaaggctacgttcttaaacccgtctatccgcgcttctttaatgtgggtacgcgcgtggcgattaaatgcaagaactccaaattttcggagaaagcctttctgattgaaccaattaaagcgaaggttgaactgacggagaacgataaacgtctgctcggaatcttaagcgaatatgttacctggaaccgcgtcagtaacgtactgtcacatattggctcagtggatgccaaagattttgggcgtgtttcgggtctgacgatgaaagacatcattcgcgaagcagcacgcgaaggccatgatctgttgttcgctgataacccgtcggcggtgctgaaggagctgaccggcctcatccagaacacgattcgctccaaatggcacgaagttctggag

SEQ ID NO: 2636 - protein, 346 aa, synthetic construct
  REGION 1..346: note = variant of RNA ligase 2 from Klebsiella phage KP179
MHHHHHHGGSNMFAYYSSLENHTNAKFISKIRGAGFLSHTVEWVAREKIHGTNFSVIITPTEIVPAKRTGPILEDESFFGHEIIMKKYMDSFKKVQNMLNAMDLVSVQIFGEFAGGGIQKGVDYGDKDFYVFDILSDSGNEKVYWDDYRVESFCTTVGLKLAPLLGRGSFAELSQYPNDFKSLVNRYNELVDTVGLEMANKHVFGPQASSETGLAEGYVLKPVYPRFFNVGTRVAIKCKNSKFSEKAFLIEPIKAKVELTENDKRLLGILSEYVTWNRVSNVLSHIGSVDAKDFGRVSGLTMKDIIREAAREGHDLLFADNPSAVLKELTGLIQNTIRSKWHEVLE

SEQ ID NO: 2637 - DNA, 1038 bp, synthetic construct
  misc_feature 1..1038: note = variant of RNA ligase 2 from Klebsiella phage KP179
  source 1..1038: mol_type = other DNA
atgcatcaccatcaccatcacggtggcagcaacatgtttgcgtattattcaagtctggaaaaccataccaatgccaagttcattagcaagatccgtggtgcaggcttcctgagccacaccgtggaatgggtagctcgcgagaagattcatggaacgaactttagcgttatcattactccgaccgaaatcgtgccggccaaacgcacagggccgatcttggaagacgagagcttctttggtcatgaagcggttatgaaaaaatatatggactcgttcaaaaaggtgcagaacatgctgaatgcgatggatcttgttagcgtgcaaatctttggcgaatttgcgggtggtggcattcagaaaggcgtcgattacggcgacaaagatttctatgtgtttgacatcctgtctgatagcgggaacgagaaagtttactgggatgactatcgcgtcgaatcgttttgcaccactgtgggtctgaaactggcgcctctgctgggacgtggtagtttcgctgaactgtcccagtacccaaacgatttcaaaagcctggtgaaccgttataatgaattggttgatacggtcggcctggagatggccaataaacacgtctttggtccgcaagcgtcttctgaaactggcctggcagaaggctacgttcttaaacccgtctatccgcgcttctttaatgtgggtacgcgcgtggcgattaaatgcaagaactccaaattttcggagaaagcctttctgattgaaccaattaaagcgaaggttgaactgacggagaacgataaacgtctgctcggaatcttaagcgaatatgttacctggaaccgcgtcagtaacgtactgtcacatattggctcagtgaccgccaaagattttgggcgtgtttcgggtctgacgatgaaagacatcattcgcgaagcagcacgcgaaggccatgatctgttgtctgctgataacccgagcgcggtgctgaaggagctggaaggcctcatccagaacacgattcgctccaaatggcacgaagttctggag

SEQ ID NO: 2638 - protein, 346 aa, synthetic construct
  REGION 1..346: note = variant of RNA ligase 2 from Klebsiella phage KP179
MHHHHHHGGSNMFAYYSSLENHTNAKFISKIRGAGFLSHTVEWVAREKIHGTNFSVIITPTEIVPAKRTGPILEDESFFGHEAVMKKYMDSFKKVQNMLNAMDLVSVQIFGEFAGGGIQKGVDYGDKDFYVFDILSDSGNEKVYWDDYRVESFCTTVGLKLAPLLGRGSFAELSQYPNDFKSLVNRYNELVDTVGLEMANKHVFGPQASSETGLAEGYVLKPVYPRFFNVGTRVAIKCKNSKFSEKAFLIEPIKAKVELTENDKRLLGILSEYVTWNRVSNVLSHIGSVTAKDFGRVSGLTMKDIIREAAREGHDLLSADNPSAVLKELEGLIQNTIRSKWHEVLE

SEQ ID NO: 2639 - DNA, 1038 bp, synthetic construct
  misc_feature 1..1038: note = variant of RNA ligase 2 from Klebsiella phage KP179
  source 1..1038: mol_type = other DNA
atgcatcaccatcaccatcacggtggcagcaacatgtttgcgtattattcaagtctggaaaaccataccaatgccaagttcattagcaagatccgtggtgcaggcttcctgagccacaccgtggaatgggtagctcgcgagaagattcatggaacgaactttagcgttatcattactccgaccgaaatccagccggccaaacgcacagggccgatcttggaagacgagagcttctttggtcatgaagcggttatgaaaaaatatatggactcgttcaaaaaggtgcagaacatgctgaatgcgatggatcttgttagcgtgcaaatctttggcgaatttgcgggtggtggcattcagaaaggcgtcgattacggagacaaagatttctatgtgtttgacatcctgtctgatagcgggaacgagaaagtttactgggatgactatcgcgtcgaatcgttttgcaccactgtgggtctgaaaatggcgcctctgctgggacgtggtagtttcgctgaactgtcccagtacccaaacgatttcaaaagcctggtgaaccgttataatgaattggttgaaacggtcggcctggagatggccaataaacacgtctttggtccgcaagcgtcttctgaaactggcctggcagaaggctacgttcttaaacccgtctatccgcgcttctttaatgtgggtacgcgcgtggcgattaaatgcaagaactccaaattttcggagaaagcctttctgattgaaccaattaaagcgaaggttgaactgacggagaacgataaacgtctgctcggaatctttagcgaatatgttacctggaaccgcgtcagtaacgtactgtcacatattggctcagtggatgccaaagattttgggcgtgtttcgggtctgacgatgaaagacatcattcgcgaagcagcacgcgaaggccatgatctgttgtctgctgataacccgagcgcggtgctgaaggagctgacaggcctcatccagaacacgattcgctccaaatggcacgaagttctggag

SEQ ID NO: 2640 - protein, 346 aa, synthetic construct
  REGION 1..346: note = variant of RNA ligase 2 from Klebsiella phage KP179
MHHHHHHGGSNMFAYYSSLENHTNAKFISKIRGAGFLSHTVEWVAREKIHGTNFSVIITPTEIQPAKRTGPILEDESFFGHEAVMKKYMDSFKKVQNMLNAMDLVSVQIFGEFAGGGIQKGVDYGDKDFYVFDILSDSGNEKVYWDDYRVESFCTTVGLKMAPLLGRGSFAELSQYPNDFKSLVNRYNELVETVGLEMANKHVFGPQASSETGLAEGYVLKPVYPRFFNVGTRVAIKCKNSKFSEKAFLIEPIKAKVELTENDKRLLGIFSEYVTWNRVSNVLSHIGSVDAKDFGRVSGLTMKDIIREAAREGHDLLSADNPSAVLKELTGLIQNTIRSKWHEVLE

SEQ ID NO: 2641 - DNA, 1038 bp, synthetic construct
  misc_feature 1..1038: note = variant of RNA ligase 2 from Klebsiella phage KP179
  source 1..1038: mol_type = other DNA
atgcatcaccatcaccatcacggtggcagcaacatgtttgcgtattattcaagtctggaaaaccataccaatgccaagttcattagcaagatccgtggtgcaggcttcctgagccacaccgtggaatgggtagctcgcgagaagattcatggaacgaactttagcgttatcattactccgaccgaaatcgtgccggccaaacgcacagggccgatcttggaagacgagagcttctttggtcatgaaattatcatgaaaaaatatatggacgcgttcaaaaaggtgcagaacatgctgaatgcgatggatcttgttagcgtgcaaatctttggcgaatttgcgggtggtggcattcagaaaggcgtcgattacggcgacaaagatttctatgtgtttgacatcctgtctgatagcgggaacgagaaagtttactgggatgactatcgcgtcgaatcgttttgcaccactgtgggtctgaaagtggcgcctctgctgggacgtggtagtttcgctgaactgtcccagtacccaaacgatttcaaaagcctggtgaaccgttataatgaattggttgatacggtcggcctggagatggccaataaacacgtctttggtccgcaagcgtcttctgaaactggcctggcagaaggctacgttcttaaacccgtctatccgcgcttctttaatgtgggtacgcgcgtggcgattaaatgcaagaactccaaattttcggagaaagcctttctgattgaaccaattaaagcgaaggttgaactgacggagaacgataaacgtctgctcggaatctttagcgaatatgttacctggaaccgcgtcagtaacgtactgtcacatattggctcagtggatgccaaagattttgggcgtgtttcgggtctgacgatgaaagacatcattcgcgaagcagcacgcgaaggccatgatctgttgtctgctgataacccgagcgcggtgctgaaggagctggaaggcctcatccagaacacgattcgctccaaatggcacgaagttctggag

SEQ ID NO: 2642 - protein, 346 aa, synthetic construct
  REGION 1..346: note = variant of RNA ligase 2 from Klebsiella phage KP179
MHHHHHHGGSNMFAYYSSLENHTNAKFISKIRGAGFLSHTVEWVAREKIHGTNFSVIITPTEIVPAKRTGPILEDESFFGHEIIMKKYMDAFKKVQNMLNAMDLVSVQIFGEFAGGGIQKGVDYGDKDFYVFDILSDSGNEKVYWDDYRVESFCTTVGLKVAPLLGRGSFAELSQYPNDFKSLVNRYNELVDTVGLEMANKHVFGPQASSETGLAEGYVLKPVYPRFFNVGTRVAIKCKNSKFSEKAFLIEPIKAKVELTENDKRLLGIFSEYVTWNRVSNVLSHIGSVDAKDFGRVSGLTMKDIIREAAREGHDLLSADNPSAVLKELEGLIQNTIRSKWHEVLE

SEQ ID NO: 2643 - DNA, 1038 bp, synthetic construct
  misc_feature 1..1038: note = variant of RNA ligase 2 from Klebsiella phage KP179
  source 1..1038: mol_type = other DNA
atgcatcaccatcaccatcacggtggcagcaacatgtttgcgtattattcaagtctggaaaaccataccaatgccaagttcattagcaagatccgtggtgcaggcttcctgagccacaccgtggaatgggtagctcgcgagaagattcatggaacgaactttagcgttatcattactccgaccgaaatcgtgccggccaaacgcacagggccgatcttggaagacgagagcttctttggtcatgaaattatcatgaaaaaatatatggactcgttcaaaaaggtgcagaacatgctgaatgcgatggatcttgttagcgtgcaaatctttggcgaatttgcgggtggtggcattcagaaaggcgtcgattacggcgacaaagatttctatgtgtttgacatcctgtctgatagcgggaacgagaaagtttactgggatgactatcgcgtcgaatcgttctgcaccactgtgggtctgaaagtggcgcctctgctgggacgtggtagtttcgctgaactgtcccagtacccaaacgatttcaaaagcctggtgaaccgttataatgaattggttgatacggtcggcctggagatggccaataaacacgtctttggtccgcaagcgtcttctgaaactggcctggcagaaggctacgttcttaaacccgtctatccgcgcttctttaatgtgggtacgcgcgtggcgattaaatgcaagaactccaaattttcggagaaagcctttctgattgaaccaattaaagcgaaggttgaactgacggagaacgataaacgtctgctcggaatctttagcgaatatgttacctggaaccgcgtcagtaacgtactgtcacatattggctcagtgaccgccaaagattttgggcgtgtttcgggtctgacgatgaaagacatcattcgcgaagcagcacgcgaaggccatgatctgttgttcgctgataacccgtcggcggtgctgaaggagctggaaggcctcatccagaacacgattcgctccaaatggcacgaagttctggag

SEQ ID NO: 2644 - protein, 346 aa, synthetic construct
  REGION 1..346: note = variant of RNA ligase 2 from Klebsiella phage KP179
MHHHHHHGGSNMFAYYSSLENHTNAKFISKIRGAGFLSHTVEWVAREKIHGTNFSVIITPTEIVPAKRTGPILEDESFFGHEIIMKKYMDSFKKVQNMLNAMDLVSVQIFGEFAGGGIQKGVDYGDKDFYVFDILSDSGNEKVYWDDYRVESFCTTVGLKVAPLLGRGSFAELSQYPNDFKSLVNRYNELVDTVGLEMANKHVFGPQASSETGLAEGYVLKPVYPRFFNVGTRVAIKCKNSKFSEKAFLIEPIKAKVELTENDKRLLGIFSEYVTWNRVSNVLSHIGSVTAKDFGRVSGLTMKDIIREAAREGHDLLFADNPSAVLKELEGLIQNTIRSKWHEVLE

SEQ ID NO: 2645 - DNA, 1038 bp, synthetic construct
  misc_feature 1..1038: note = variant of RNA ligase 2 from Klebsiella phage KP179
  source 1..1038: mol_type = other DNA
atgcatcaccatcaccatcacggtggcagcaacatgtttgcgtattattcaagtctggaaaaccataccaatgccaagttcattagcaagatccgtggtgcaggcttcctgagccacaccgtggaatgggtagctcgcgagaagattcatggaacgaactttagcgttatcattactccgaccgaaatcgtgccggccaaacgcacagggccgatcttggaagacgagagcttctttggtcatgaaattatcatgaaaaaatatatggactcgttcaaaaaggtgcagaacatgctgaatgcgatggatcttgttagcgtgcaaatctttggcgaatttgcgggtggtggcattcagaaaggcgtcgattacggcgacaaagatttctatgtgtttgacatcctgtctgatagcgggaacgagaaagtttactgggatgactatcgcgtcgaatcgttttgcaccactgtgggtctgaaagtggcgcctctgctgggacgtggtagtttcgctgaactgtcccagtacccaaacgatttcaaaagcctggtgaaccgttataatgaattggttgatacggtcggcctggagatggccaataaacacgtctttggtccgcaagcgtcttctgaaactggctgcgcagaaggctacgttcttaaacccgtctatccgcgcttctttaatgtgggtacgcgcgtggcgattaaatgcaagaactccaaattttcggagaaagcctttctgattgaaccaattaaagcgaaggttgaactgacggagaacgataaacgtctgctcggaatcttaagcgaatatgttacctggaaccgcgtcagtaacgtactgtcacatattggctcagtggatgccaaagattttgggcgtgtttcgggtctgacgatgaaagacatcattcgcgaagcagcacgcgaaggccatgatctgttgttcgctgataacccgtcggcggtgctgaaggagctggaaggcctcatccagaacacgattcgctccaaatggcacgaagttctggag

SEQ ID NO: 2646 - protein, 346 aa, synthetic construct
  REGION 1..346: note = variant of RNA ligase 2 from Klebsiella phage KP179
MHHHHHHGGSNMFAYYSSLENHTNAKFISKIRGAGFLSHTVEWVAREKIHGTNFSVIITPTEIVPAKRTGPILEDESFFGHEIIMKKYMDSFKKVQNMLNAMDLVSVQIFGEFAGGGIQKGVDYGDKDFYVFDILSDSGNEKVYWDDYRVESFCTTVGLKVAPLLGRGSFAELSQYPNDFKSLVNRYNELVDTVGLEMANKHVFGPQASSETGCAEGYVLKPVYPRFFNVGTRVAIKCKNSKFSEKAFLIEPIKAKVELTENDKRLLGILSEYVTWNRVSNVLSHIGSVDAKDFGRVSGLTMKDIIREAAREGHDLLFADNPSAVLKELEGLIQNTIRSKWHEVLE

SEQ ID NO: 2647 - DNA, 1038 bp, synthetic construct
  misc_feature 1..1038: note = variant of RNA ligase 2 from Klebsiella phage KP179
  source 1..1038: mol_type = other DNA
atgcatcaccatcaccatcacggtggcagcaacatgtttgcgtattattcaagtctggaaaaccataccaatgccaagttcattagcaagatccgtggtgcaggcttcctgagccacaccgtggaatgggtagctcgcgagaagattcatggaacgaactttagcgttatcattactccgaccgaaatcgtgccggccaaacgcacagggccgatcttggaagacgagagcttctttggtcatgaaattatcatgaaaaaatatatggactccttcaaaaaggtgcagaacatgctgaatgcgatggatcttgttagcgtgcaaatctttggcgaatttgcgggtggtggcattcagaaaggcgtcgattacggagacaaagatttctatgtgtttgacatcctgtctgatagcgggaacgagaaagtttactgggatgactatcgcgtcgaatcgttttgcaccactgtgggtctgaaactggcgcctctgctgggacgtggtagtttcgctgaactgtcccagtacccaaacgatttcaaaagcctggtgaaccgttataatgaattggttgaaacggtcggcctggagatggccaataaacacgtctttggtccgcaagcgtcttctgaaactggcctggcagaaggctacgttcttaaacccgtctatccgcgcttctttaatgtgggtacgcgcgtggcgattaaatgcaagaactccaaattttcggagaaagcctttctgattgaaccaattaaagcgaaggttgaactgacggagaacgataaacgtctgctcggaatcttaagcgaatatgttacctggaaccgcgtcagtaacgtactgtcacatattggctcagtgaccgccaaagattttgggcgtgtttcgggtctgacgatgaaagacatcattcgcgaagcagcacgcgaaggccatgatctgttgtctgctgataacccgagcgcggtgctgaaggagctgacaggcctcatccagaacacgattcgctccaaatggcacgaagttctggag

SEQ ID NO: 2648 - protein, 346 aa, synthetic construct
  REGION 1..346: note = variant of RNA ligase 2 from Klebsiella phage KP179
MHHHHHHGGSNMFAYYSSLENHTNAKFISKIRGAGFLSHTVEWVAREKIHGTNFSVIITPTEIVPAKRTGPILEDESFFGHEIIMKKYMDSFKKVQNMLNAMDLVSVQIFGEFAGGGIQKGVDYGDKDFYVFDILSDSGNEKVYWDDYRVESFCTTVGLKLAPLLGRGSFAELSQYPNDFKSLVNRYNELVETVGLEMANKHVFGPQASSETGLAEGYVLKPVYPRFFNVGTRVAIKCKNSKFSEKAFLIEPIKAKVELTENDKRLLGILSEYVTWNRVSNVLSHIGSVTAKDFGRVSGLTMKDIIREAAREGHDLLSADNPSAVLKELTGLIQNTIRSKWHEVLE

SEQ ID NO: 2649 - DNA, 1038 bp, synthetic construct
  misc_feature 1..1038: note = variant of RNA ligase 2 from Klebsiella phage KP179
  source 1..1038: mol_type = other DNA
atgcatcaccatcaccatcacggtggcagcaacatgtttgcgtattattcaagtctggaaaaccataccaatgccaagttcattagcaagatccgtggtgcaggcttcctgagccacaccgtggaatgggtagctcgcgagaagattcatggaacgaactttagcgttatcattactccgaccgaaatcgtgccggccaaacgcacagggccgatcttggaagacgagagcttctttggtcatgaaattatcatgaaaaaatatatggacgcgttcaaaaaggtgcagaacatgctgaatgcgatggatcttgttagcgtgcaaatctttggcgaatttgcgggtggtggcattcagaaaggcgtcgattacggcgacaaagatttctatgtgtttgacatcctgtctgatagcgggaacgagaaagtttactgggatgactatcgcgtcgaatcgttttgcaccactgtgggtctgaaaatggcgcctctgctgggacgtggtagtttcgctgaactgtcccagtacccaaacgatttcaaaagcctggtgaaccgttataatgaattggttgaaacggtcggcctggagatggccaataaacacgtctttggtccgcaagcgtcttctgaaactggcctggcagaaggctacgttcttaaacccgtctatccgcgcttctttaatgtgggtacgcgcgtggcgattaaatgcaagaactccaaattttcggagaaagcctttctgattgaaccaattaaagcgaaggttgaactgacggagaacgataaacgtctgctcggaatctttagcgaatatgttacctggaaccgcgtcagtaacgtactgtcacatattggctcagtgactgccaaagattttgggcgtgtttcgggtctgacgatgaaagacatcattcgcgaagcagcacgcgaaggccatgatctgttgttcgctgataacccgtcggcggtgctgaaggagctggaaggcctcatccagaacacgattcgctccaaatggcacgaagttctggag

SEQ ID NO: 2650 - protein, 346 aa, synthetic construct
  REGION 1..346: note = variant of RNA ligase 2 from Klebsiella phage KP179
MHHHHHHGGSNMFAYYSSLENHTNAKFISKIRGAGFLSHTVEWVAREKIHGTNFSVIITPTEIVPAKRTGPILEDESFFGHEIIMKKYMDAFKKVQNMLNAMDLVSVQIFGEFAGGGIQKGVDYGDKDFYVFDILSDSGNEKVYWDDYRVESFCTTVGLKMAPLLGRGSFAELSQYPNDFKSLVNRYNELVETVGLEMANKHVFGPQASSETGLAEGYVLKPVYPRFFNVGTRVAIKCKNSKFSEKAFLIEPIKAKVELTENDKRLLGIFSEYVTWNRVSNVLSHIGSVTAKDFGRVSGLTMKDIIREAAREGHDLLFADNPSAVLKELEGLIQNTIRSKWHEVLE

SEQ ID NO: 2651 - DNA, 1038 bp, synthetic construct
  misc_feature 1..1038: note = variant of RNA ligase 2 from Klebsiella phage KP179
  source 1..1038: mol_type = other DNA
atgcatcaccatcaccatcacggtggcagcaacatgtttgcgtattattcaagtctggaaaaccataccaatgccaagttcattagcaagatccgtggtgcaggcttcctgagccacaccgtggaatgggtagctcgcgagaagattcatggaacgaactttagcgttatcattactccgaccgaaatcgtgccggccaaacgcacagggccgatcttggaagacgagagcttctttggtcatgaaattatcatgaaaaaatatatggactccttcaaaaaggtgcagaacatgctgaatgcgatggatcttgttagcgtgcaaatctttggcgaatttgcgggtggtggcattcagaaaggcgtcgattacggagacaaagatttctatgtgtttgacatcctgtctgatagcgggaacgagaaagtttactgggatgactatcgcgtcgaatcgttttgcaccactgtgggtctgaaagtggcgcctctgctgggacgtggtagtttcgctgaactgtcccagtacccaaacgatttcaaaagcctggtgaaccgttataatgaattggttgatacggtcggcctggagatggccaataaacacgtctttggtccgcaagcgtcttctgaaactggcctggcagaaggctacgttcttaaacccgtctatccgcgcttctttaatgtgggtacgcgcgtggcgattaaatgcaagaactccaaattttcggagaaagcctttctgattgaaccaattaaagcgaaggttgaactgacggagaacgataaacgtctgctcggaatcttaagcgaatatgttacctggaaccgcgtcagtaacgtactgtcacatattggctcagtgaccgccaaagattttgggcgtgtttcgggtctgacgatgaaagacatcattcgcgaagcagcacgcgaaggccatgatctgttgttcgctgataacccgtcggcggtgctgaaggagctgacaggcctcatccagaacacgattcgctccaaatggcacgaagttctggag

SEQ ID NO: 2652 - protein, 346 aa, synthetic construct
  REGION 1..346: note = variant of RNA ligase 2 from Klebsiella phage KP179
MHHHHHHGGSNMFAYYSSLENHTNAKFISKIRGAGFLSHTVEWVAREKIHGTNFSVIITPTEIVPAKRTGPILEDESFFGHEIIMKKYMDSFKKVQNMLNAMDLVSVQIFGEFAGGGIQKGVDYGDKDFYVFDILSDSGNEKVYWDDYRVESFCTTVGLKVAPLLGRGSFAELSQYPNDFKSLVNRYNELVDTVGLEMANKHVFGPQASSETGLAEGYVLKPVYPRFFNVGTRVAIKCKNSKFSEKAFLIEPIKAKVELTENDKRLLGILSEYVTWNRVSNVLSHIGSVTAKDFGRVSGLTMKDIIREAAREGHDLLFADNPSAVLKELTGLIQNTIRSKWHEVLE

SEQ ID NO: 2653 - DNA, 1038 bp, synthetic construct
  misc_feature 1..1038: note = variant of RNA ligase 2 from Klebsiella phage KP179
  source 1..1038: mol_type = other DNA
atgcatcaccatcaccatcacggtggcagcaacatgtttgcgtattattcaagtctggaaaaccataccaatgccaagttcattagcaagatccgtggtgcaggcttcctgagccacaccgtggaatgggtagctcgcgagaagattcatggaacgaactttagcgttatcattactccgaccgaaatcgtgccggccaaacgcacagggccgatcttggaagacgagagcttctttggtcatgaaattatcatgaaaaaatatatggactccttcaaaaaggtgcagaacatgctgaatgcgatggatcttgttagcgtgcaaatctttggcgaatttgcgggtggtggcattcagaaaggcgtcgattacggagacaaagatttctatgtgtttgacatcctgtctgatagcgggaacgagaaagtttactgggatgactatcgcgtcgaatcgttttgcaccactgtgggtctgaaattagcgcctctgctgggacgtggtagtttcgctgaactgtcccagtacccaaacgatttccctagcctggtgaaccgttataatgaattggttgatacggtcggcctggagatggccaataaacacgtctttggtccgcaagcgtcttctgaaactggcctggcagaaggctacgttcttaaacccgtctatccgcgcttctttaatgtgggtacgcgcgtggcgattaaatgcaagaactccaaattttcggagaaagcctttctgattgaaccaattaaagcgaaggttgaactgacggagaacgataaacgtctgctcggaatctttagcgaatatgttacctggaaccgcgtcagtaacgtactgtcacatattggctcagtgaccgccaaagattttgggcgtgtttcgggtctgacgatgaaagacatcattcgcgaagcagcacgcgaaggccatgatctgttgttcgctgataacccgtcggcggtgctgaaggagctggaaggcctcatccagaacacgattcgctccaaatggcacgaagttctggag

SEQ ID NO: 2654 - protein, 346 aa, synthetic construct
  REGION 1..346: note = variant of RNA ligase 2 from Klebsiella phage KP179
MHHHHHHGGSNMFAYYSSLENHTNAKFISKIRGAGFLSHTVEWVAREKIHGTNFSVIITPTEIVPAKRTGPILEDESFFGHEIIMKKYMDSFKKVQNMLNAMDLVSVQIFGEFAGGGIQKGVDYGDKDFYVFDILSDSGNEKVYWDDYRVESFCTTVGLKLAPLLGRGSFAELSQYPNDFPSLVNRYNELVDTVGLEMANKHVFGPQASSETGLAEGYVLKPVYPRFFNVGTRVAIKCKNSKFSEKAFLIEPIKAKVELTENDKRLLGIFSEYVTWNRVSNVLSHIGSVTAKDFGRVSGLTMKDIIREAAREGHDLLFADNPSAVLKELEGLIQNTIRSKWHEVLE

SEQ ID NO: 2655 - DNA, 1038 bp, synthetic construct
  misc_feature 1..1038: note = variant of RNA ligase 2 from Klebsiella phage KP179
  source 1..1038: mol_type = other DNA
atgcatcaccatcaccatcacggtggcagcaacatgtttgcgtattattcaagtctggaaaaccataccaatgccaagttcattagcaagatccgtggtgcaggcttcctgagccacaccgtggaatgggtagctcgcgagaagattcatggaacgaactttagcgttatcattactccgaccgaaatcgtgccggccaaacgcacagggccgatcttggaagacgagagcttctttggtcatgaaattatcatgaaaaaatatatggactcgttcaaaaaggtgcagaacatgctgaatgcgatggatcttgttagcgtgcaaatctttggcgaatttgcgggtggtggcattcagaaaggcgtcgattacggcgacaaagatttctatgtgtttgacatcctgtctgatagcgggaacgagaaagtttactgggatgactatcgcgtcgaatcgttctgcaccactgtgggtctgaaactggcgcctctgctgggacgtggtagtttcgctgaactgtcccagtacccaaacgatttccctagcctggtgaaccgttataatgaattggttgatacggtcggcctggagatggccaataaacacgtctttggtccgcaagcgtcttctgaaactggcctggcagaaggctacgttcttaaacccgtctatccgcgcttctttaatgtgggtacgcgcgtggcgattaaatgcaagaactccaaattttcggagaaagcctttctgattgaaccaattaaagcgaaggttgaactgacggagaacgataaacgtctgctcggaatcttaagcgaatatgttacctggaaccgcgtcagtaacgtactgtcacatattggctcagtgaccgccaaagattttgggcgtgtttcgggtctgacgatgaaagacatcattcgcgaagcagcacgcgaaggccatgatctgttgttcgctgataacccgtcggcggtgctgaaggagctggaaggcctcatccagaacacgattcgctccaaatggcacgaagttctggag

SEQ ID NO: 2656 - protein, 346 aa, synthetic construct
  REGION 1..346: note = variant of RNA ligase 2 from Klebsiella phage KP179
MHHHHHHGGSNMFAYYSSLENHTNAKFISKIRGAGFLSHTVEWVAREKIHGTNFSVIITPTEIVPAKRTGPILEDESFFGHEIIMKKYMDSFKKVQNMLNAMDLVSVQIFGEFAGGGIQKGVDYGDKDFYVFDILSDSGNEKVYWDDYRVESFCTTVGLKLAPLLGRGSFAELSQYPNDFPSLVNRYNELVDTVGLEMANKHVFGPQASSETGLAEGYVLKPVYPRFFNVGTRVAIKCKNSKFSEKAFLIEPIKAKVELTENDKRLLGILSEYVTWNRVSNVLSHIGSVTAKDFGRVSGLTMKDIIREAAREGHDLLFADNPSAVLKELEGLIQNTIRSKWHEVLE

SEQ ID NO: 2657 - DNA, 1038 bp, synthetic construct
  misc_feature 1..1038: note = variant of RNA ligase 2 from Klebsiella phage KP179
  source 1..1038: mol_type = other DNA
atgcatcaccatcaccatcacggtggcagcaacatgtttgcgtattattcaagtctggaaaaccataccaatgccaagttcattagcaagatccgtggtgcaggcttcctgagccacaccgtggaatgggtagctcgcgagaagattcatggaacgaactttagcgttatcattactccgaccgaaatcgtgccggccaaacgcacagggccgatcttggaagacgagagcttctttggtcatgaaattatcatgaaaaaatatatggacgcgttcaaaaaggtgcagaacatgctgaatgcgatggatcttgttagcgtgcaaatctttggcgaatttgcgggtggtggcattcagaaaggcgtcgattacggcgacaaagatttctatgtgtttgacatcctgtctgatagcgggaacgagaaagtttactgggatgactatcgcgtcgaatcgttttgcaccactgtgggtctgaaattagcgcctctgctgggacgtggtagtttcgctgaactgtcccagtacccaaacgatttccgtagcctggtgaaccgttataatgaattggttgaaacggtcggcctggagatggccaataaacacgtctttggtccgcaagcgtcttctgaaactggcctggcagaaggctacgttcttaaacccgtctatccgcgcttctttaatgtgggtacgcgcgtggcgattaaatgcaagaactccaaattttcggagaaagcctttctgattgaaccaattaaagcgaaggttgaactgacggagaacgataaacgtctgctcggaatctttagcgaatatgttacctggaaccgcgtcagtaacgtactgtcacatattggctcagtggatgccaaagattttgggcgtgtttcgggtctgacgatgaaagacatcattcgcgaagcagcacgcgaaggccatgatctgttgttcgctgataacccgtcggcggtgctgaaggagctgacaggcctcatccagaacacgattcgctccaaatggcacgaagttctggag

SEQ ID NO: 2658 - protein, 346 aa, synthetic construct
  REGION 1..346: note = variant of RNA ligase 2 from Klebsiella phage KP179
MHHHHHHGGSNMFAYYSSLENHTNAKFISKIRGAGFLSHTVEWVAREKIHGTNFSVIITPTEIVPAKRTGPILEDESFFGHEIIMKKYMDAFKKVQNMLNAMDLVSVQIFGEFAGGGIQKGVDYGDKDFYVFDILSDSGNEKVYWDDYRVESFCTTVGLKLAPLLGRGSFAELSQYPNDFRSLVNRYNELVETVGLEMANKHVFGPQASSETGLAEGYVLKPVYPRFFNVGTRVAIKCKNSKFSEKAFLIEPIKAKVELTENDKRLLGIFSEYVTWNRVSNVLSHIGSVDAKDFGRVSGLTMKDIIREAAREGHDLLFADNPSAVLKELTGLIQNTIRSKWHEVLE

SEQ ID NO: 2659 - DNA, 1038 bp, synthetic construct
  misc_feature 1..1038: note = variant of RNA ligase 2 from Klebsiella phage KP179
  source 1..1038: mol_type = other DNA
atgcatcaccatcaccatcacggtggcagcaacatgtttgcgtattattcaagtctggaaaaccataccaatgccaagttcattagcaagatccgtggtgcaggcttcctgagccacaccgtggaatgggtagctcgcgagaagattcatggaacgaactttagcgttatcattactccgaccgaaatcgtgccggccaaacgcacagggccgatcttggaagacgagagcttctttggtcatgaaattatcatgaaaaaatatatggactcgttcaaaaaggtgcagaacatgctgaatgcgatggatcttgttagcgtgcaaatctttggcgaatttgcgggtggtggcattcagaaaggcgtcgattacggagacaaagatttctatgtgtttgacatcctgtctgatagcgggaacgagaaagtttactgggatgactatcgcgtcgaatcgttttgcaccactgtgggtctgaaaatggcgcctctgctgggacgtggtagtttcgctgaactgtcccagtacccaaacgatttcaaaagcctggtgaaccgttataatgaattggttgatacggtcggcctggagatggccaataaacacgtctttggtccgcaagcgtcttctgaaactggcctggcagaaggctacgttcttaaacccgtctatccgcgcttctttaatgtgggtacgcgcgtggcgattaaatgcaagaactccaaattttcggagaaagcctttctgattgaaccaattaaagcgaaggttgaactgacggagaacgataaacgtctgctcggaatctttagcgaatatgttacctggaaccgcgtcagtaacgtactgtcacatattggctcagtggatgccaaagattttgggcgtgtttcgggtctgacgatgaaagacatcattcgcgaagcagcacgcgaaggccatgatctgttgttcgctgataacccgtcggcggtgctgaaggagctgaccggcctcatccagaacacgattcgctccaaatggcacgaagttctggag

SEQ ID NO: 2660 - protein, 346 aa, synthetic construct
  REGION 1..346: note = variant of RNA ligase 2 from Klebsiella phage KP179
MHHHHHHGGSNMFAYYSSLENHTNAKFISKIRGAGFLSHTVEWVAREKIHGTNFSVIITPTEIVPAKRTGPILEDESFFGHEIIMKKYMDSFKKVQNMLNAMDLVSVQIFGEFAGGGIQKGVDYGDKDFYVFDILSDSGNEKVYWDDYRVESFCTTVGLKMAPLLGRGSFAELSQYPNDFKSLVNRYNELVDTVGLEMANKHVFGPQASSETGLAEGYVLKPVYPRFFNVGTRVAIKCKNSKFSEKAFLIEPIKAKVELTENDKRLLGIFSEYVTWNRVSNVLSHIGSVDAKDFGRVSGLTMKDIIREAAREGHDLLFADNPSAVLKELTGLIQNTIRSKWHEVLE

SEQ ID NO: 2661 - DNA, 1038 bp, synthetic construct
  misc_feature 1..1038: note = variant of RNA ligase 2 from Klebsiella phage KP179
  source 1..1038: mol_type = other DNA
atgcatcaccatcaccatcacggtggcagcaacatgtttgcgtattattcaagtctggaaaaccataccaatgccaagttcattagcaagatccgtggtgcaggcttcctgagccacaccgtggaatgggtagctcgcgagaagattcatggaacgaactttagcgttatcattactccgaccgaaatcgtgccggccaaacgcacagggccgatcttggaagacgagagcttctttggtcatgaagcgatcatgaaaaaatatatggactcgttcaaaaaggtgcagaacatgctgaatgcgatggatcttgttagcgtgcaaatctttggcgaatttgcgggtggtggcattcagaaaggcgtcgattacggcgacaaagatttctatgtgtttgacatcctgtctgatagcgggaacgagaaagtttactgggatgactatcgcgtcgaatcgttttgcaccactgtgggtctgaaaatggcgcctctgctgggacgtggtagtttcgctgaactgtcccagtacccaaacgatttcaaaagcctggtgaaccgttataatgaattggttgatacggtcggcctggagatggccaataaacacgtctttggtccgcaagcgtcttctgaaactggcctggcagaaggctacgttcttaaacccgtctatccgcgcttctttaatgtgggtacgcgcgtggcgattaaatgcaagaactccaaattttcggagaaagcctttctgattgaaccaattaaagcgaaggttgaactgacggagaacgataaacgtctgctcggaatcttaagcgaatatgttacctggaaccgcgtcagtaacgtactgtcacatattggctcagtgaccgccaaagattttgggcgtgtttcgggtctgacgatgaaagacatcattcgcgaagcagcacgcgaaggccatgatctgttgttcgctgataacccgtcggcggtgctgaaggagctgacaggcctcatccagaacacgattcgctccaaatggcacgaagttctggag

SEQ ID NO: 2662 - protein, 346 aa, synthetic construct
  REGION 1..346: note = variant of RNA ligase 2 from Klebsiella phage KP179
MHHHHHHGGSNMFAYYSSLENHTNAKFISKIRGAGFLSHTVEWVAREKIHGTNFSVIITPTEIVPAKRTGPILEDESFFGHEAIMKKYMDSFKKVQNMLNAMDLVSVQIFGEFAGGGIQKGVDYGDKDFYVFDILSDSGNEKVYWDDYRVESFCTTVGLKMAPLLGRGSFAELSQYPNDFKSLVNRYNELVDTVGLEMANKHVFGPQASSETGLAEGYVLKPVYPRFFNVGTRVAIKCKNSKFSEKAFLIEPIKAKVELTENDKRLLGILSEYVTWNRVSNVLSHIGSVTAKDFGRVSGLTMKDIIREAAREGHDLLFADNPSAVLKELTGLIQNTIRSKWHEVLE

SEQ ID NO: 2663 - DNA, 1038 bp, synthetic construct
  misc_feature 1..1038: note = variant of RNA ligase 2 from Klebsiella phage KP179
  source 1..1038: mol_type = other DNA
atgcatcaccatcaccatcacggtggcagcaacatgtttgcgtattattcaagtctggaaaaccataccaatgccaagttcattagcaagatccgtggtgcaggcttcctgagccacaccgtggaatgggtagctcgcgagaagattcatggaacgaactttagcgttatcattactccgaccgaaatcgtgccggccaaacgcacagggccgatcttggaagacgagagcttctttggtcatgaagcgatcatgaaaaaatatatggactccttcaaaaaggtgcagaacatgctgaatgcgatggatcttgttagcgtgcaaatctttggcgaatttgcgggtggtggcattcagaaaggcgtcgattacggcgacaaagatttctatgtgtttgacatcctgtctgatagcgggaacgagaaagtttactgggatgactatcgcgtcgaatcgttttgcaccactgtgggtctgaaattagcgcctctgctgggacgtggtagtttcgctgaactgtcccagtacccaaacgatttcaaaagcctggtgaaccgttataatgaattggttgaaacggtcggcctggagatggccaataaacacgtctttggtccgcaagcgtcttctgaaactggcctggcagaaggctacgttcttaaacccgtctatccgcgcttctttaatgtgggtacgcgcgtggcgattaaatgcaagaactccaaattttcggagaaagcctttctgattgaaccaattaaagcgaaggttgaactgacggagaacgataaacgtctgctcggaatctttagcgaatatgttacctggaaccgcgtcagtaacgtactgtcacatattggctcagtgaccgccaaagattttgggcgtgtttcgggtctgacgatgaaagacatcattcgcgaagcagcacgcgaaggccatgatctgttgtctgctgataacccgagcgcggtgctgaaggagctgacaggcctcatccagaacacgattcgctccaaatggcacgaagttctggag

SEQ ID NO: 2664 - protein, 346 aa, synthetic construct
  REGION 1..346: note = variant of RNA ligase 2 from Klebsiella phage KP179
MHHHHHHGGSNMFAYYSSLENHTNAKFISKIRGAGFLSHTVEWVAREKIHGTNFSVIITPTEIVPAKRTGPILEDESFFGHEAIMKKYMDSFKKVQNMLNAMDLVSVQIFGEFAGGGIQKGVDYGDKDFYVFDILSDSGNEKVYWDDYRVESFCTTVGLKLAPLLGRGSFAELSQYPNDFKSLVNRYNELVETVGLEMANKHVFGPQASSETGLAEGYVLKPVYPRFFNVGTRVAIKCKNSKFSEKAFLIEPIKAKVELTENDKRLLGIFSEYVTWNRVSNVLSHIGSVTAKDFGRVSGLTMKDIIREAAREGHDLLSADNPSAVLKELTGLIQNTIRSKWHEVLE

SEQ ID NO: 2665 - DNA, 1038 bp, synthetic construct
  misc_feature 1..1038: note = variant of RNA ligase 2 from Klebsiella phage KP179
  source 1..1038: mol_type = other DNA
atgcatcaccatcaccatcacggtggcagcaacatgtttgcgtattattcaagtctggaaaaccataccaatgccaagttcattagcaagatccgtggtgcaggcttcctgagccacaccgtggaatgggtagctcgcgagaagattcatggaacgaactttagcgttatcattactccgaccgaaatcgtgccggccaaacgcacagggccgatcttggaagacgagagcttctttggtcatgaaattatcatgaaaaaatatatggactcgttcaaaaaggtgcagaacatgctgaatgcgatggatcttgttagcgtgcaaatctttggcgaatttgcgggtggtggcattcagaaaggcgtcgattacggcgacaaagatttctatgtgtttgacatcctgtctgatagcgggaacgagaaagtttactgggatgactatcgcgtcgaatcgttttgcaccactgtgggtctgaaactggcgcctctgctgggacgtggtagtttcgctgaactgtcccagtacccaaacgatttcaaaagcctggtgaaccgttataatgaattggttgatacggtcggcctggagatggccaataaacacgtctttggtccgcaagcgtcttctgaaactggctgcgcagaaggctacgttcttaaacccgtctatccgcgcttctttaatgtgggtacgcgcgtggcgattaaatgcaagaactccaaattttcggagaaagcctttctgattgaaccaattaaagcgaaggttgaactgacggagaacgataaacgtctgctcggaatctttagcgaatatgttacctggaaccgcgtcagtaacgtactgtcacatattggctcagtgactgccaaagattttgggcgtgtttcgggtctgacgatgaaagacatcattcgcgaagcagcacgcgaaggccatgatctgttgttcgctgataacccgtcggcggtgctgaaggagctggaaggcctcatccagaacacgattcgctccaaatggcacgaagttctggag

SEQ ID NO: 2666 - protein, 346 aa, synthetic construct
  REGION 1..346: note = variant of RNA ligase 2 from Klebsiella phage KP179
MHHHHHHGGSNMFAYYSSLENHTNAKFISKIRGAGFLSHTVEWVAREKIHGTNFSVIITPTEIVPAKRTGPILEDESFFGHEIIMKKYMDSFKKVQNMLNAMDLVSVQIFGEFAGGGIQKGVDYGDKDFYVFDILSDSGNEKVYWDDYRVESFCTTVGLKLAPLLGRGSFAELSQYPNDFKSLVNRYNELVDTVGLEMANKHVFGPQASSETGCAEGYVLKPVYPRFFNVGTRVAIKCKNSKFSEKAFLIEPIKAKVELTENDKRLLGIFSEYVTWNRVSNVLSHIGSVTAKDFGRVSGLTMKDIIREAAREGHDLLFADNPSAVLKELEGLIQNTIRSKWHEVLE

SEQ ID NO: 2667 - DNA, 1038 bp, synthetic construct
  misc_feature 1..1038: note = variant of RNA ligase 2 from Klebsiella phage KP179
  source 1..1038: mol_type = other DNA
atgcatcaccatcaccatcacggtggcagcaacatgtttgcgtattattcaagtctggaaaaccataccaatgccaagttcattagcaagatccgtggtgcaggcttcctgagccacaccgtggaatgggtagctcgcgagaagattcatggaacgaactttagcgttatcattactccgaccgaaatcgtgccggccaaacgcacagggccgatcttggaagacgagagcttctttggtcatgaagcgattatgaaaaaatatatggactccttcaaaaaggtgcagaacatgctgaatgcgatggatcttgttagcgtgcaaatctttggcgaatttgcgggtggtggcattcagaaaggcgtcgattacggcgacaaagatttctatgtgtttgacatcctgtctgatagcgggaacgagaaagtttactgggatgactatcgcgtcgaatcgttttgcaccactgtgggtctgaaaatggcgcctctgctgggacgtggtagtttcgctgaactgtcccagtacccaaacgatttcaaaagcctggtgaaccgttataatgaattggttgatacggtcggcctggagatggccaataaacacgtctttggtccgcaagcgtcttctgaaactggcctggcagaaggctacgttcttaaacccgtctatccgcgcttctttaatgtgggtacgcgcgtggcgattaaatgcaagaactccaaattttcggagaaagcctttctgattgaaccaattaaagcgaaggttgaactgacggagaacgataaacgtctgctcggaatctttagcgaatatgttacctggaaccgcgtcagtaacgtactgtcacatattggctcagtggatgccaaagattttgggcgtgtttcgggtctgacgatgaaagacatcattcgcgaagcagcacgcgaaggccatgatctgttgttcgctgataacccgtcggcggtgctgaaggagctggaaggcctcatccagaacacgattcgctccaaatggcacgaagttctggag

SEQ ID NO: 2668 - protein, 346 aa, synthetic construct
  REGION 1..346: note = variant of RNA ligase 2 from Klebsiella phage KP179
MHHHHHHGGSNMFAYYSSLENHTNAKFISKIRGAGFLSHTVEWVAREKIHGTNFSVIITPTEIVPAKRTGPILEDESFFGHEAIMKKYMDSFKKVQNMLNAMDLVSVQIFGEFAGGGIQKGVDYGDKDFYVFDILSDSGNEKVYWDDYRVESFCTTVGLKMAPLLGRGSFAELSQYPNDFKSLVNRYNELVDTVGLEMANKHVFGPQASSETGLAEGYVLKPVYPRFFNVGTRVAIKCKNSKFSEKAFLIEPIKAKVELTENDKRLLGIFSEYVTWNRVSNVLSHIGSVDAKDFGRVSGLTMKDIIREAAREGHDLLFADNPSAVLKELEGLIQNTIRSKWHEVLE

SEQ ID NO: 2669 - DNA, 1038 bp, synthetic construct
  misc_feature 1..1038: note = variant of RNA ligase 2 from Klebsiella phage KP179
  source 1..1038: mol_type = other DNA
atgcatcaccatcaccatcacggtggcagcaacatgtttgcgtattattcaagtctggaaaaccataccaatgccaagttcattagcaagatccgtggtgcaggcttcctgagccacaccgtggaatgggtagctcgcgagaagattcatggaacgaactttagcgttatcattactccgaccgaaatccagccggccaaacgcacagggccgatcttggaagacgagagcttctttggtcatgaagcgattatgaaaaaatatatggactcgttcaaaaaggtgcagaacatgctgaatgcgatggatcttgttagcgtgcaaatctttggcgaatttgcgggtggtggcattcagaaaggcgtcgattacggcgacaaagatttctatgtgtttgacatcctgtctgatagcgggaacgagaaagtttactgggatgactatcgcgtcgaatcgttttgcaccactgtgggtctgaaaatggcgcctctgctgggacgtggtagtttcgctgaactgtcccagtacccaaacgatttcaaaagcctggtgaaccgttataatgaattggttgatacggtcggcctggagatggccaataaacacgtctttggtccgcaagcgtcttctgaaactggcctggcagaaggctacgttcttaaacccgtctatccgcgcttctttaatgtgggtacgcgcgtggcgattaaatgcaagaactccaaattttcggagaaagcctttctgattgaaccaattaaagcgaaggttgaactgacggagaacgataaacgtctgctcggaatctttagcgaatatgttacctggaaccgcgtcagtaacgtactgtcacatattggctcagtggatgccaaagattttgggcgtgtttcgggtctgacgatgaaagacatcattcgcgaagcagcacgcgaaggccatgatctgttgttcgctgataacccgtcggcggtgctgaaggagctggaaggcctcatccagaacacgattcgctccaaatggcacgaagttctggag

SEQ ID NO: 2670 - protein, 346 aa, synthetic construct
  REGION 1..346: note = variant of RNA ligase 2 from Klebsiella phage KP179
MHHHHHHGGSNMFAYYSSLENHTNAKFISKIRGAGFLSHTVEWVAREKIHGTNFSVIITPTEIQPAKRTGPILEDESFFGHEAIMKKYMDSFKKVQNMLNAMDLVSVQIFGEFAGGGIQKGVDYGDKDFYVFDILSDSGNEKVYWDDYRVESFCTTVGLKMAPLLGRGSFAELSQYPNDFKSLVNRYNELVDTVGLEMANKHVFGPQASSETGLAEGYVLKPVYPRFFNVGTRVAIKCKNSKFSEKAFLIEPIKAKVELTENDKRLLGIFSEYVTWNRVSNVLSHIGSVDAKDFGRVSGLTMKDIIREAAREGHDLLFADNPSAVLKELEGLIQNTIRSKWHEVLE

SEQ ID NO: 2671 - DNA, 1038 bp, synthetic construct
  misc_feature 1..1038: note = variant of RNA ligase 2 from Klebsiella phage KP179
  source 1..1038: mol_type = other DNA
atgcatcaccatcaccatcacggtggcagcaacatgtttgcgtattattcaagtctggaaaaccataccaatgccaagttcattagcaagatccgtggtgcaggcttcctgagccacaccgtggaatgggtagctcgcgagaagattcatggaacgaactttagcgttatcattactccgaccgaaatcgtgccggccaaacgcacagggccgatcttggaagacgagagcttctttggtcatgaagcgattatgaaaaaatatatggactccttcaaaaaggtgcagaacatgctgaatgcgatggatcttgttagcgtgcaaatctttggcgaatttgcgggtggtggcattcagaaaggcgtcgattacggcgacaaagatttctatgtgtttgacatcctgtctgatagcgggaacgagaaagtttactgggatgactatcgcgtcgaatcgttttgcaccactgtgggtctgaaaatggcgcctctgctgggacgtggtagtttcgctgaactgtcccagtacccaaacgatttcaaaagcctggtgaaccgttataatgaattggttgaaacggtcggcctggagatggccaataaacacgtctttggtccgcaagcgtcttctgaaactggctgcgcagaaggctacgttcttaaacccgtctatccgcgcttctttaatgtgggtacgcgcgtggcgattaaatgcaagaactccaaattttcggagaaagcctttctgattgaaccaattaaagcgaaggttgaactgacggagaacgataaacgtctgctcggaatctttagcgaatatgttacctggaaccgcgtcagtaacgtactgtcacatattggctcagtgaccgccaaagattttgggcgtgtttcgggtctgacgatgaaagacatcattcgcgaagcagcacgcgaaggccatgatctgttgtctgctgataacccgagcgcggtgctgaaggagctgacaggcctcatccagaacacgattcgctccaaatggcacgaagttctggag

SEQ ID NO: 2672 - protein, 346 aa, synthetic construct
  REGION 1..346: note = variant of RNA ligase 2 from Klebsiella phage KP179
MHHHHHHGGSNMFAYYSSLENHTNAKFISKIRGAGFLSHTVEWVAREKIHGTNFSVIITPTEIVPAKRTGPILEDESFFGHEAIMKKYMDSFKKVQNMLNAMDLVSVQIFGEFAGGGIQKGVDYGDKDFYVFDILSDSGNEKVYWDDYRVESFCTTVGLKMAPLLGRGSFAELSQYPNDFKSLVNRYNELVETVGLEMANKHVFGPQASSETGCAEGYVLKPVYPRFFNVGTRVAIKCKNSKFSEKAFLIEPIKAKVELTENDKRLLGIFSEYVTWNRVSNVLSHIGSVTAKDFGRVSGLTMKDIIREAAREGHDLLSADNPSAVLKELTGLIQNTIRSKWHEVLE

SEQ ID NO: 2673 - DNA, 1038 bp, synthetic construct
  misc_feature 1..1038: note = variant of RNA ligase 2 from Klebsiella phage KP179
  source 1..1038: mol_type = other DNA
atgcatcaccatcaccatcacggtggcagcaacatgtttgcgtattattcaagtctggaaaaccataccaatgccaagttcattagcaagatccgtggtgcaggcttcctgagccacaccgtggaatgggtagctcgcgagaagattcatggaacgaactttagcgttatcattactccgaccgaaatcgtgccggccaaacgcacagggccgatcttggaagacgagagcttctttggtcatgaaattatcatgaaaaaatatatggactccttcaaaaaggtgcagaacatgctgaatgcgatggatcttgttagcgtgcaaatctttggcgaatttgcgggtggtggcattcagaaaggctttgattacggagacaaagatttctatgtgtttgacatcctgtctgatagcgggaacgagaaaagctactgggatgactatcgcgtcgaatcgttttgcaccactgttggtctgaaattagcgcctctgctgggacgtggtagtttcgctgaactgtcccagtacccaaacgatttcaaaagcctggtgaaccgttataatgaattggttgatacggtcggcctggagatggccaataaacacgtctttggtccgcaagcgtcttctgaagaaggcctggcagaaggctacgttcttaaacccgtctatccgcgcttctttaatgtgggtacgcgcgtggcgattaaatgcaagaactccaaattttcggagaaagcctttctgattgaaccaattaaagcgaaggttgaactgacggagaacgataaacgtctgctcggaatctttagcgaatatgttacctggaaccgcgtcagtaacgtactgtcacatattggctcagtgaccgccaaagattttgtccgtgtttcgggtctgacgatgaaagacatcattcgcgaagcagcacgcgaaggccatgatctgttgttcgctgataacccgtcggcggtgctgaaggagctgacaggcctcatccagaacacgattcgctccaaatggcacgaagttctggag

SEQ ID NO: 2674 - protein, 346 aa, synthetic construct
  REGION 1..346: note = variant of RNA ligase 2 from Klebsiella phage KP179
MHHHHHHGGSNMFAYYSSLENHTNAKFISKIRGAGFLSHTVEWVAREKIHGTNFSVIITPTEIVPAKRTGPILEDESFFGHEIIMKKYMDSFKKVQNMLNAMDLVSVQIFGEFAGGGIQKGFDYGDKDFYVFDILSDSGNEKSYWDDYRVESFCTTVGLKLAPLLGRGSFAELSQYPNDFKSLVNRYNELVDTVGLEMANKHVFGPQASSEEGLAEGYVLKPVYPRFFNVGTRVAIKCKNSKFSEKAFLIEPIKAKVELTENDKRLLGIFSEYVTWNRVSNVLSHIGSVTAKDFVRVSGLTMKDIIREAAREGHDLLFADNPSAVLKELTGLIQNTIRSKWHEVLE

SEQ ID NO: 2675 - DNA, 1038 bp, synthetic construct
  misc_feature 1..1038: note = variant of RNA ligase 2 from Klebsiella phage KP179
  source 1..1038: mol_type = other DNA
atgcatcaccatcaccatcacggtggcagcaacatgtttgcgtattattcaagtctggaaaaccataccaatgccaagttcattagcaagatccgtggtgcaggcttcctgagccacaccgtggaatgggtagctcgcgagaagattcatggaacgaactttagcgttatcattactccgaccgaaatcgtgccggccaaacgcacagggccgatcttggaagacgagagcttctttggtcatgaaattatcatgaaaaaatatatggactcgttcaaaaaggtgcagaacatgctgaatgcgatggatcttgttagcgtgcaaatctttggcgaatttgcgggtggtggcattcagaaaggcgtcgattacggcgacaaagatttctatgtgtttgacatcctgtctgatagcgggaacgagaaagtttactgggatgactatcgcgtcgaatcgttttgcaccactgtgggtctgaaagtggcgcctctgctgggacgtggtagtttcgctgaactgtcccagtacccaaacgatttcaaaagcctggtgaaccgttataatgaattggttgaaacggtcggcctggagatggccaataaacacgtctttggtccgcaagcgtcttctgaaactggcctggcagaaggctacgttcttaaacccgtctatccgcgcttctttaatgtgggtacgcgcgtggcgattaaatgcaagaactccaaattttcggagaaagcctttctgattgaaccaattaaagcgaaggttgaactgacggagaacgataaacgtctgctcggaatcttaagcgaatatgttacctggaaccgcgtcagtaacgtactgtcacatattggctcagtggatgccaaagattttgggcgtgtttcgggtctgacgatgaaagacatcattcgcgaagcagcacgcgaaggccatgatctgttgttcgctgataacccgtcggcggtgctgaaggagctgacaggcctcatccagaacacgattcgctccaaatggcacgaagttctggag

SEQ ID NO: 2676 - protein, 346 aa, synthetic construct
  REGION 1..346: note = variant of RNA ligase 2 from Klebsiella phage KP179
MHHHHHHGGSNMFAYYSSLENHTNAKFISKIRGAGFLSHTVEWVAREKIHGTNFSVIITPTEIVPAKRTGPILEDESFFGHEIIMKKYMDSFKKVQNMLNAMDLVSVQIFGEFAGGGIQKGVDYGDKDFYVFDILSDSGNEKVYWDDYRVESFCTTVGLKVAPLLGRGSFAELSQYPNDFKSLVNRYNELVETVGLEMANKHVFGPQASSETGLAEGYVLKPVYPRFFNVGTRVAIKCKNSKFSEKAFLIEPIKAKVELTENDKRLLGILSEYVTWNRVSNVLSHIGSVDAKDFGRVSGLTMKDIIREAAREGHDLLFADNPSAVLKELTGLIQNTIRSKWHEVLE

SEQ ID NO: 2677 - DNA, 1038 bp, synthetic construct
  misc_feature 1..1038: note = variant of RNA ligase 2 from Klebsiella phage KP179
  source 1..1038: mol_type = other DNA
atgcatcaccatcaccatcacggtggcagcaacatgtttgcgtattattcaagtctggaaaaccataccaatgccaagttcattagcaagatccgtggtgcaggcttcctgagccacaccgtggaatgggtagctcgcgagaagattcatggaacgaactttagcgttatcattactccgaccgaaatcgtgccggccaaacgcacagggccgatcttggaagacgagagcttctttggtcatgaaattatcatgaaaaaatatatggactcgttcaaaaaggtgcagaacatgctgaatgcgatggatcttgttagcgtgcaaatctttggcgaatttgcgggtggtggcattcagaaaggcgtcgattacggcgacaaagatttctatgtgtttgacatcctgtctgatagcgggaacgagaaagtttactgggatgactatcgcgtcgaatcgttttgcaccactgtgggtctgaaattagcgcctctgctgggacgtggtagtttcgctgaactgtcccagtacccaaacgatttccctagcctggtgaaccgttataatgaattggttgatacggtcggcctggagatggccaataaacacgtctttggtccgcaagcgtcttctgaaactggcctggcagaaggctacgttcttaaacccgtctatccgcgcttctttaatgtgggtacgcgcgtggcgattaaatgcaagaactccaaattttcggagaaagcctttctgattgaaccaattaaagcgaaggttgaactgacggagaacgataaacgtctgctcggaatctttagcgaatatgttacctggaaccgcgtcagtaacgtactgtcacatattggctcagtggatgccaaagattttgggcgtgtttcgggtctgacgatgaaagacatcattcgcgaagcagcacgcgaaggccatgatctgttgttcgctgataacccgtcggcggtgctgaaggagctgacaggcctcatccagaacacgattcgctccaaatggcacgaagttctggag

SEQ ID NO: 2678 - protein, 346 aa, synthetic construct
  REGION 1..346: note = variant of RNA ligase 2 from Klebsiella phage KP179
MHHHHHHGGSNMFAYYSSLENHTNAKFISKIRGAGFLSHTVEWVAREKIHGTNFSVIITPTEIVPAKRTGPILEDESFFGHEIIMKKYMDSFKKVQNMLNAMDLVSVQIFGEFAGGGIQKGVDYGDKDFYVFDILSDSGNEKVYWDDYRVESFCTTVGLKLAPLLGRGSFAELSQYPNDFPSLVNRYNELVDTVGLEMANKHVFGPQASSETGLAEGYVLKPVYPRFFNVGTRVAIKCKNSKFSEKAFLIEPIKAKVELTENDKRLLGIFSEYVTWNRVSNVLSHIGSVDAKDFGRVSGLTMKDIIREAAREGHDLLFADNPSAVLKELTGLIQNTIRSKWHEVLE

SEQ ID NO: 2679 - DNA, 1038 bp, synthetic construct
  misc_feature 1..1038: note = variant of RNA ligase 2 from Klebsiella phage KP179
  source 1..1038: mol_type = other DNA
atgcatcaccatcaccatcacggtggcagcaacatgtttgcgtattattcaagtctggaaaaccataccaatgccaagttcattagcaagatccgtggtgcaggcttcctgagccacaccgtggaatgggtagctcgcgagaagattcatggaacgaactttagcgttatcattactccgaccgaaatcgtgccggccaaacgcacagggccgatcttggaagacgagagcttctttggtcatgaaattatcatgaaaaaatatatggacgcgttcaaaaaggtgcagaacatgctgaatgcgatggatcttgttagcgtgcaaatctttggcgaatttgcgggtggtggcattcagaaaggcgtcgattacggcgacaaagatttctatgtgtttgacatcctgtctgatagcgggaacgagaaagtttactgggatgactatcgcgtcgaatcgttttgcaccactgtgggtctgaaagtggcgcctctgctgggacgtggtagtttcgctgaactgtcccagtacccaaacgatttcaaaagcctggtgaaccgttataatgaattggttgatacggtcggcctggagatggccaataaacacgtctttggtccgcaagcgtcttctgaaactggctgcgcagaaggctacgttcttaaacccgtctatccgcgcttctttaatgtgggtacgcgcgtggcgattaaatgcaagaactccaaattttcggagaaagcctttctgattgaaccaattaaagcgaaggttgaactgacggagaacgataaacgtctgctcggaatcttaagcgaatatgttacctggaaccgcgtcagtaacgtactgtcacatattggctcagtggatgccaaagattttgggcgtgtttcgggtctgacgatgaaagacatcattcgcgaagcagcacgcgaaggccatgatctgttgtctgctgataacccgagcgcggtgctgaaggagctgaccggcctcatccagaacacgattcgctccaaatggcacgaagttctggag

SEQ ID NO: 2680 - protein, 346 aa, synthetic construct
  REGION 1..346: note = variant of RNA ligase 2 from Klebsiella phage KP179
MHHHHHHGGSNMFAYYSSLENHTNAKFISKIRGAGFLSHTVEWVAREKIHGTNFSVIITPTEIVPAKRTGPILEDESFFGHEIIMKKYMDAFKKVQNMLNAMDLVSVQIFGEFAGGGIQKGVDYGDKDFYVFDILSDSGNEKVYWDDYRVESFCTTVGLKVAPLLGRGSFAELSQYPNDFKSLVNRYNELVDTVGLEMANKHVFGPQASSETGCAEGYVLKPVYPRFFNVGTRVAIKCKNSKFSEKAFLIEPIKAKVELTENDKRLLGILSEYVTWNRVSNVLSHIGSVDAKDFGRVSGLTMKDIIREAAREGHDLLSADNPSAVLKELTGLIQNTIRSKWHEVLE

SEQ ID NO: 2681 - DNA, 1038 bp, synthetic construct
  misc_feature 1..1038: note = variant of RNA ligase 2 from Klebsiella phage KP179
  source 1..1038: mol_type = other DNA
atgcatcaccatcaccatcacggtggcagcaacatgtttgcgtattattcaagtctggaaaaccataccaatgccaagttcattagcaagatccgtggtgcaggcttcctgagccacaccgtggaatgggtagctcgcgagaagattcatggaacgaactttagcgttatcattactccgaccgaaatcgtgccggccaaacgcacagggccgatcttggaagacgagagcttctttggtcatgaaattatcatgaaaaaatatatggacgcgttcaaaaaggtgcagaacatgctgaatgcgatggatcttgttagcgtgcaaatctttggcgaatttgcgggtggtggcattcagaaaggcgtcgattacggcgacaaagatttctatgtgtttgacatcctgtctgatagcgggaacgagaaagtttactgggatgactatcgcgtcgaatcgttttgcaccactgtgggtctgaaattagcgcctctgctgggacgtggtagtttcgctgaactgtcccagtacccaaacgatttcaaaagcctggtgaaccgttataatgaattggttgaaacggtcggcctggagatggccaataaacacgtctttggtccgcaagcgtcttctgaaactggctgcgcagaaggctacgttcttaaacccgtctatccgcgcttctttaatgtgggtacgcgcgtggcgattaaatgcaagaactccaaattttcggagaaagcctttctgattgaaccaattaaagcgaaggttgaactgacggagaacgataaacgtctgctcggaatcttaagcgaatatgttacctggaaccgcgtcagtaacgtactgtcacatattggctcagtgaccgccaaagattttgggcgtgtttcgggtctgacgatgaaagacatcattcgcgaagcagcacgcgaaggccatgatctgttgttcgctgataacccgtcggcggtgctgaaggagctgacaggcctcatccagaacacgattcgctccaaatggcacgaagttctggag

SEQ ID NO: 2682 - protein, 346 aa, synthetic construct
  REGION 1..346: note = variant of RNA ligase 2 from Klebsiella phage KP179
MHHHHHHGGSNMFAYYSSLENHTNAKFISKIRGAGFLSHTVEWVAREKIHGTNFSVIITPTEIVPAKRTGPILEDESFFGHEIIMKKYMDAFKKVQNMLNAMDLVSVQIFGEFAGGGIQKGVDYGDKDFYVFDILSDSGNEKVYWDDYRVESFCTTVGLKLAPLLGRGSFAELSQYPNDFKSLVNRYNELVETVGLEMANKHVFGPQASSETGCAEGYVLKPVYPRFFNVGTRVAIKCKNSKFSEKAFLIEPIKAKVELTENDKRLLGILSEYVTWNRVSNVLSHIGSVTAKDFGRVSGLTMKDIIREAAREGHDLLFADNPSAVLKELTGLIQNTIRSKWHEVLE

SEQ ID NO: 2683 - DNA, 1038 bp, synthetic construct
  misc_feature 1..1038: note = variant of RNA ligase 2 from Klebsiella phage KP179
  source 1..1038: mol_type = other DNA
atgcatcaccatcaccatcacggtggcagcaacatgtttgcgtattattcaagtctggaaaaccataccaatgccaagttcattagcaagatccgtggtgcaggcttcctgagccacaccgtggaatgggtagctcgcgagaagattcatggaacgaactttagcgttatcattactccgaccgaaatcgtgccggccaaacgcacagggccgatcttggaagacgagagcttctttggtcatgaaattatcatgaaaaaatatatggactccttcaaaaaggtgcagaacatgctgaatgcgatggatcttgttagcgtgcaaatctttggcgaatttgcgggtggtggcattcagaaaggcgtcgattacggagacaaagatttctatgtgtttgacatcctgtctgatagcgggaacgagaaagtttactgggatgactatcgcgtcgaatcgttttgcaccactgtgggtctgaaattagcgcctctgctgggacgtggtagtttcgctgaactgtcccagtacccaaacgatttcaaaagcctggtgaaccgttataatgaattggttgatacggtcggcctggagatggccaataaacacgtctttggtccgcaagcgtcttctgaaactggctgcgcagaaggctacgttcttaaacccgtctatccgcgcttctttaatgtgggtacgcgcgtggcgattaaatgcaagaactccaaattttcggagaaagcctttctgattgaaccaattaaagcgaaggttgaactgacggagaacgataaacgtctgctcggaatctttagcgaatatgttacctggaaccgcgtcagtaacgtactgtcacatattggctcagtggatgccaaagattttgggcgtgtttcgggtctgacgatgaaagacatcattcgcgaagcagcacgcgaaggccatgatctgttgttcgctgataacccgtcggcggtgctgaaggagctgaccggcctcatccagaacacgattcgctccaaatggcacgaagttctggag

SEQ ID NO: 2684 - protein, 346 aa, synthetic construct
  REGION 1..346: note = variant of RNA ligase 2 from Klebsiella phage KP179
MHHHHHHGGSNMFAYYSSLENHTNAKFISKIRGAGFLSHTVEWVAREKIHGTNFSVIITPTEIVPAKRTGPILEDESFFGHEIIMKKYMDSFKKVQNMLNAMDLVSVQIFGEFAGGGIQKGVDYGDKDFYVFDILSDSGNEKVYWDDYRVESFCTTVGLKLAPLLGRGSFAELSQYPNDFKSLVNRYNELVDTVGLEMANKHVFGPQASSETGCAEGYVLKPVYPRFFNVGTRVAIKCKNSKFSEKAFLIEPIKAKVELTENDKRLLGIFSEYVTWNRVSNVLSHIGSVDAKDFGRVSGLTMKDIIREAAREGHDLLFADNPSAVLKELTGLIQNTIRSKWHEVLE

SEQ ID NO: 2685 - DNA, 1038 bp, synthetic construct
  misc_feature 1..1038: note = variant of RNA ligase 2 from Klebsiella phage KP179
  source 1..1038: mol_type = other DNA
atgcatcaccatcaccatcacggtggcagcaacatgtttgcgtattattcaagtctggaaaaccataccaatgccaagttcattagcaagatccgtggtgcaggcttcctgagccacaccgtggaatgggtagctcgcgagaagattcatggaacgaactttagcgttatcattactccgaccgaaatccagccggccaaacgcacagggccgatcttggaagacgagagcttctttggtcatgaagcgatcatgaaaaaatatatggactccttcaaaaaggtgcagaacatgctgaatgcgatggatcttgttagcgtgcaaatctttggcgaatttgcgggtggtggcattcagaaaggcgtcgattacggcgacaaagatttctatgtgtttgacatcctgtctgatagcgggaacgagaaagtttactgggatgactatcgcgtcgaatcgttttgcaccactgtgggtctgaaaatggcgcctctgctgggacgtggtagtttcgctgaactgtcccagtacccaaacgatttcaaaagcctggtgaaccgttataatgaattggttgatacggtcggcctggagatggccaataaacacgtctttggtccgcaagcgtcttctgaaactggcctggcagaaggctacgttcttaaacccgtctatccgcgcttctttaatgtgggtacgcgcgtggcgattaaatgcaagaactccaaattttcggagaaagcctttctgattgaaccaattaaagcgaaggttgaactgacggagaacgataaacgtctgctcggaatcttaagcgaatatgttacctggaaccgcgtcagtaacgtactgtcacatattggctcagtgaccgccaaagattttgggcgtgtttcgggtctgacgatgaaagacatcattcgcgaagcagcacgcgaaggccatgatctgttgtctgctgataacccgagcgcggtgctgaaggagctggaaggcctcatccagaacacgattcgctccaaatggcacgaagttctggag

SEQ ID NO: 2686 - protein, 346 aa, synthetic construct
  REGION 1..346: note = variant of RNA ligase 2 from Klebsiella phage KP179
MHHHHHHGGSNMFAYYSSLENHTNAKFISKIRGAGFLSHTVEWVAREKIHGTNFSVIITPTEIQPAKRTGPILEDESFFGHEAIMKKYMDSFKKVQNMLNAMDLVSVQIFGEFAGGGIQKGVDYGDKDFYVFDILSDSGNEKVYWDDYRVESFCTTVGLKMAPLLGRGSFAELSQYPNDFKSLVNRYNELVDTVGLEMANKHVFGPQASSETGLAEGYVLKPVYPRFFNVGTRVAIKCKNSKFSEKAFLIEPIKAKVELTENDKRLLGILSEYVTWNRVSNVLSHIGSVTAKDFGRVSGLTMKDIIREAAREGHDLLSADNPSAVLKELEGLIQNTIRSKWHEVLE

SEQ ID NO: 2687 - DNA, 1038 bp, synthetic construct
  misc_feature 1..1038: note = variant of RNA ligase 2 from Klebsiella phage KP179
  source 1..1038: mol_type = other DNA
atgcatcaccatcaccatcacggtggcagcaacatgtttgcgtattattcaagtctggaaaaccataccaatgccaagttcattagcaagatccgtggtgcaggcttcctgagccacaccgtggaatgggtagctcgcgagaagattcatggaacgaactttagcgttatcattactccgaccgaaatcgtgccggccaaacgcacagggccgatcttggaagacgagagcttctttggtcatgaaattatcatgaaaaaatatatggacgcgttcaaaaaggtgcagaacatgctgaatgcgatggatcttgttagcgtgcaaatctttggcgaatttgcgggtggtggcattcagaaaggcgtcgattacggagacaaagatttctatgtgtttgacatcctgtctgatagcgggaacgagaaagtttactgggatgactatcgcgtcgaatcgttttgcaccactgtgggtctgaaaatggcgcctctgctgggacgtggtagtttcgctgaactgtcccagtacccaaacgatttccctagcctggtgaaccgttataatgaattggttgatacggtcggcctggagatggccaataaacacgtctttggtccgcaagcgtcttctgaaactggcctggcagaaggctacgttcttaaacccgtctatccgcgcttctttaatgtgggtacgcgcgtggcgattaaatgcaagaactccaaattttcggagaaagcctttctgattgaaccaattaaagcgaaggttgaactgacggagaacgataaacgtctgctcggaatctttagcgaatatgttacctggaaccgcgtcagtaacgtactgtcacatattggctcagtgaccgccaaagattttgggcgtgtttcgggtctgacgatgaaagacatcattcgcgaagcagcacgcgaaggccatgatctgttgttcgctgataacccgtcggcggtgctgaaggagctggaaggcctcatccagaacacgattcgctccaaatggcacgaagttctggag

SEQ ID NO: 2688 - protein, 346 aa, synthetic construct
  REGION 1..346: note = variant of RNA ligase 2 from Klebsiella phage KP179
MHHHHHHGGSNMFAYYSSLENHTNAKFISKIRGAGFLSHTVEWVAREKIHGTNFSVIITPTEIVPAKRTGPILEDESFFGHEIIMKKYMDAFKKVQNMLNAMDLVSVQIFGEFAGGGIQKGVDYGDKDFYVFDILSDSGNEKVYWDDYRVESFCTTVGLKMAPLLGRGSFAELSQYPNDFPSLVNRYNELVDTVGLEMANKHVFGPQASSETGLAEGYVLKPVYPRFFNVGTRVAIKCKNSKFSEKAFLIEPIKAKVELTENDKRLLGIFSEYVTWNRVSNVLSHIGSVTAKDFGRVSGLTMKDIIREAAREGHDLLFADNPSAVLKELEGLIQNTIRSKWHEVLE

SEQ ID NO: 2689 - DNA, 1038 bp, synthetic construct
  misc_feature 1..1038: note = variant of RNA ligase 2 from Klebsiella phage KP179
  source 1..1038: mol_type = other DNA
atgcatcaccatcaccatcacggtggcagcaacatgtttgcgtattattcaagtctggaaaaccataccaatgccaagttcattagcaagatccgtggtgcaggcttcctgagccacaccgtggaatgggtagctcgcgagaagattcatggaacgaactttagcgttatcattactccgaccgaaatcgtgccggccaaacgcacagggccgatcttggaagacgagagcttctttggtcatgaaattatcatgaaaaaatatatggactcgttcaaaaaggtgcagaacatgctgaatgcgatggatcttgttagcgtgcaaatctttggcgaatttgcgggtggtggcattcagaaaggcgtcgattacggcgacaaagatttctatgtgtttgacatcctgtctgatagcgggaacgagaaagtttactgggatgactatcgcgtcgaatcgttttgcaccactgtgggtctgaaaatggcgcctctgctgggacgtggtagtttcgctgaactgtcccagtacccaaacgatttcaaaagcctggtgaaccgttataatgaattggttgatacggtcggcctggagatggccaataaacacgtctttggtccgcaagcgtcttctgaaactggcctggcagaaggctacgttcttaaacccgtctatccgcgcttctttaatgtgggtacgcgcgtggcgattaaatgcaagaactccaaattttcggagaaagcctttctgattgaaccaattaaagcgaaggttgaactgacggagaacgataaacgtctgctcggaatctttagcgaatatgttacctggaaccgcgtcagtaacgtactgtcacatattggctcagtgaccgccaaagattttgggcgtgtttcgggtctgacgatgaaagacatcattcgcgaagcagcacgcgaaggccatgatctgttgtctgctgataacccgagcgcggtgctgaaggagctggaaggcctcatccagaacacgattcgctccaaatggcacgaagttctggag

SEQ ID NO: 2690 - protein, 346 aa, synthetic construct
  REGION 1..346: note = variant of RNA ligase 2 from Klebsiella phage KP179
MHHHHHHGGSNMFAYYSSLENHTNAKFISKIRGAGFLSHTVEWVAREKIHGTNFSVIITPTEIVPAKRTGPILEDESFFGHEIIMKKYMDSFKKVQNMLNAMDLVSVQIFGEFAGGGIQKGVDYGDKDFYVFDILSDSGNEKVYWDDYRVESFCTTVGLKMAPLLGRGSFAELSQYPNDFKSLVNRYNELVDTVGLEMANKHVFGPQASSETGLAEGYVLKPVYPRFFNVGTRVAIKCKNSKFSEKAFLIEPIKAKVELTENDKRLLGIFSEYVTWNRVSNVLSHIGSVTAKDFGRVSGLTMKDIIREAAREGHDLLSADNPSAVLKELEGLIQNTIRSKWHEVLE

SEQ ID NO: 2691 - DNA, 1038 bp, synthetic construct
  misc_feature 1..1038: note = variant of RNA ligase 2 from Klebsiella phage KP179
  source 1..1038: mol_type = other DNA
atgcatcaccatcaccatcacggtggcagcaacatgtttgcgtattattcaagtctggaaaaccataccaatgccaagttcattagcaagatccgtggtgcaggcttcctgagccacaccgtggaatgggtagctcgcgagaagattcatggaacgaactttagcgttatcattactccgaccgaaatcgtgccggccaaacgcacagggccgatcttggaagacgagagcttctttggtcatgaaattatcatgaaaaaatatatggacgcgttcaaaaaggtgcagaacatgctgaatgcgatggatcttgttagcgtgcaaatctttggcgaatttgcgggtggtggcattcagaaaggcgtcgattacggagacaaagatttctatgtgtttgacatcctgtctgatagcgggaacgagaaagtttactgggatgactatcgcgtcgaatcgttttgcaccactgtgggtctgaaattagcgcctctgctgggacgtggtagtttcgctgaactgtcccagtacccaaacgatttcaaaagcctggtgaaccgttataatgaattggttgatacggtcggcctggagatggccaataaacacgtctttggtccgcaagcgtcttctgaaactggcctggcagaaggctacgttcttaaacccgtctatccgcgcttctttaatgtgggtacgcgcgtggcgattaaatgcaagaactccaaattttcggagaaagcctttctgattgaaccaattaaagcgaaggttgaactgacggagaacgataaacgtctgctcggaatcttaagcgaatatgttacctggaaccgcgtcagtaacgtactgtcacatattggctcagtggatgccaaagattttgggcgtgtttcgggtctgacgatgaaagacatcattcgcgaagcagcacgcgaaggccatgatctgttgttcgctgataacccgtcggcggtgctgaaggagctggaaggcctcatccagaacacgattcgctccaaatggcacgaagttctggag

SEQ ID NO: 2692 - protein, 346 aa, synthetic construct
  REGION 1..346: note = variant of RNA ligase 2 from Klebsiella phage KP179
MHHHHHHGGSNMFAYYSSLENHTNAKFISKIRGAGFLSHTVEWVAREKIHGTNFSVIITPTEIVPAKRTGPILEDESFFGHEIIMKKYMDAFKKVQNMLNAMDLVSVQIFGEFAGGGIQKGVDYGDKDFYVFDILSDSGNEKVYWDDYRVESFCTTVGLKLAPLLGRGSFAELSQYPNDFKSLVNRYNELVDTVGLEMANKHVFGPQASSETGLAEGYVLKPVYPRFFNVGTRVAIKCKNSKFSEKAFLIEPIKAKVELTENDKRLLGILSEYVTWNRVSNVLSHIGSVDAKDFGRVSGLTMKDIIREAAREGHDLLFADNPSAVLKELEGLIQNTIRSKWHEVLE

SEQ ID NO: 2693 - DNA, 1038 bp, synthetic construct
  misc_feature 1..1038: note = variant of RNA ligase 2 from Klebsiella phage KP179
  source 1..1038: mol_type = other DNA
atgcatcaccatcaccatcacggtggcagcaacatgtttgcgtattattcaagtctggaaaaccataccaatgccaagttcattagcaagatccgtggtgcaggcttcctgagccacaccgtggaatgggtagctcgcgagaagattcatggaacgaactttagcgttatcattactccgaccgaaatccagccggccaaacgcacagggccgatcttggaagacgagagcttctttggtcatgaaattatcatgaaaaaatatatggactcgttcaaaaaggtgcagaacatgctgaatgcgatggatcttgttagcgtgcaaatctttggcgaatttgcgggtggtggcattcagaaaggcgtcgattacggcgacaaagatttctatgtgtttgacatcctgtctgatagcgggaacgagaaagtttactgggatgactatcgcgtcgaatcgttttgcaccactgtgggtctgaaattagcgcctctgctgggacgtggtagtttcgctgaactgtcccagtacccaaacgatttccctagcctggtgaaccgttataatgaattggttgatacggtcggcctggagatggccaataaacacgtctttggtccgcaagcgtcttctgaaactggcctggcagaaggctacgttcttaaacccgtctatccgcgcttctttaatgtgggtacgcgcgtggcgattaaatgcaagaactccaaattttcggagaaagcctttctgattgaaccaattaaagcgaaggttgaactgacggagaacgataaacgtctgctcggaatctttagcgaatatgttacctggaaccgcgtcagtaacgtactgtcacatattggctcagtggatgccaaagattttgggcgtgtttcgggtctgacgatgaaagacatcattcgcgaagcagcacgcgaaggccatgatctgttgtctgctgataacccgagcgcggtgctgaaggagctgacaggcctcatccagaacacgattcgctccaaatggcacgaagttctggag

SEQ ID NO: 2694 - protein, 346 aa, synthetic construct
  REGION 1..346: note = variant of RNA ligase 2 from Klebsiella phage KP179
MHHHHHHGGSNMFAYYSSLENHTNAKFISKIRGAGFLSHTVEWVAREKIHGTNFSVIITPTEIQPAKRTGPILEDESFFGHEIIMKKYMDSFKKVQNMLNAMDLVSVQIFGEFAGGGIQKGVDYGDKDFYVFDILSDSGNEKVYWDDYRVESFCTTVGLKLAPLLGRGSFAELSQYPNDFPSLVNRYNELVDTVGLEMANKHVFGPQASSETGLAEGYVLKPVYPRFFNVGTRVAIKCKNSKFSEKAFLIEPIKAKVELTENDKRLLGIFSEYVTWNRVSNVLSHIGSVDAKDFGRVSGLTMKDIIREAAREGHDLLSADNPSAVLKELTGLIQNTIRSKWHEVLE

SEQ ID NO: 2695 - DNA, 1038 bp, synthetic construct
  misc_feature 1..1038: note = variant of RNA ligase 2 from Klebsiella phage KP179
  source 1..1038: mol_type = other DNA
atgcatcaccatcaccatcacggtggcagcaacatgtttgcgtattattcaagtctggaaaaccataccaatgccaagttcattagcaagatccgtggtgcaggcttcctgagccacaccgtggaatgggtagctcgcgagaagattcatggaacgaactttagcgttatcattactccgaccgaaatcgtgccggccaaacgcacagggccgatcttggaagacgagagcttctttggtcatgaaattatcatgaaaaaatatatggactcgttcaaaaaggtgcagaacatgctgaatgcgatggatcttgttagcgtgcaaatctttggcgaatttgcgggtggtggcattcagaaaggcgtcgattacggagacaaagatttctatgtgtttgacatcctgtctgatagcgggaacgagaaagtttactgggatgactatcgcgtcgaatcgttttgcaccactgtgggtctgaaattagcgcctctgctgggacgtggtagtttcgctgaactgtcccagtacccaaacgatttccgtagcctggtgaaccgttataatgaattggttgatacggtcggcctggagatggccaataaacacgtctttggtccgcaagcgtcttctgaaactggcctggcagaaggctacgttcttaaacccgtctatccgcgcttctttaatgtgggtacgcgcgtggcgattaaatgcaagaactccaaattttcggagaaagcctttctgattgaaccaattaaagcgaaggttgaactgacggagaacgataaacgtctgctcggaatcttaagcgaatatgttacctggaaccgcgtcagtaacgtactgtcacatattggctcagtggatgccaaagattttgggcgtgtttcgggtctgacgatgaaagacatcattcgcgaagcagcacgcgaaggccatgatctgttgtctgctgataacccgagcgcggtgctgaaggagctgaccggcctcatccagaacacgattcgctccaaatggcacgaagttctggag

SEQ ID NO: 2696 - protein, 346 aa, synthetic construct
  REGION 1..346: note = variant of RNA ligase 2 from Klebsiella phage KP179
MHHHHHHGGSNMFAYYSSLENHTNAKFISKIRGAGFLSHTVEWVAREKIHGTNFSVIITPTEIVPAKRTGPILEDESFFGHEIIMKKYMDSFKKVQNMLNAMDLVSVQIFGEFAGGGIQKGVDYGDKDFYVFDILSDSGNEKVYWDDYRVESFCTTVGLKLAPLLGRGSFAELSQYPNDFRSLVNRYNELVDTVGLEMANKHVFGPQASSETGLAEGYVLKPVYPRFFNVGTRVAIKCKNSKFSEKAFLIEPIKAKVELTENDKRLLGILSEYVTWNRVSNVLSHIGSVDAKDFGRVSGLTMKDIIREAAREGHDLLSADNPSAVLKELTGLIQNTIRSKWHEVLE

SEQ ID NO: 2697 - DNA, 1038 bp, synthetic construct
  misc_feature 1..1038: note = variant of RNA ligase 2 from Klebsiella phage KP179
  source 1..1038: mol_type = other DNA
atgcatcaccatcaccatcacggtggcagcaacatgtttgcgtattattcaagtctggaaaaccataccaatgccaagttcattagcaagatccgtggtgcaggcttcctgagccacaccgtggaatgggtagctcgcgagaagattcatggaacgaactttagcgttatcattactccgaccgaaatccagccggccaaacgcacagggccgatcttggaagacgagagcttctttggtcatgaagcgattatgaaaaaatatatggactccttcaaaaaggtgcagaacatgctgaatgcgatggatcttgttagcgtgcaaatctttggcgaatttgcgggtggtggcattcagaaaggcgtcgattacggcgacaaagatttctatgtgtttgacatcctgtctgatagcgggaacgagaaagtttactgggatgactatcgcgtcgaatcgttttgcaccactgtgggtctgaaagtggcgcctctgctgggacgtggtagtttcgctgaactgtcccagtacccaaacgatttcaaaagcctggtgaaccgttataatgaattggttgaaacggtcggcctggagatggccaataaacacgtctttggtccgcaagcgtcttctgaaactggcctggcagaaggctacgttcttaaacccgtctatccgcgcttctttaatgtgggtacgcgcgtggcgattaaatgcaagaactccaaattttcggagaaagcctttctgattgaaccaattaaagcgaaggttgaactgacggagaacgataaacgtctgctcggaatcttaagcgaatatgttacctggaaccgcgtcagtaacgtactgtcacatattggctcagtggatgccaaagattttgggcgtgtttcgggtctgacgatgaaagacatcattcgcgaagcagcacgcgaaggccatgatctgttgtctgctgataacccgagcgcggtgctgaaggagctggaaggcctcatccagaacacgattcgctccaaatggcacgaagttctggag

SEQ ID NO: 2698 - protein, 346 aa, synthetic construct
  REGION 1..346: note = variant of RNA ligase 2 from Klebsiella phage KP179
MHHHHHHGGSNMFAYYSSLENHTNAKFISKIRGAGFLSHTVEWVAREKIHGTNFSVIITPTEIQPAKRTGPILEDESFFGHEAIMKKYMDSFKKVQNMLNAMDLVSVQIFGEFAGGGIQKGVDYGDKDFYVFDILSDSGNEKVYWDDYRVESFCTTVGLKVAPLLGRGSFAELSQYPNDFKSLVNRYNELVETVGLEMANKHVFGPQASSETGLAEGYVLKPVYPRFFNVGTRVAIKCKNSKFSEKAFLIEPIKAKVELTENDKRLLGILSEYVTWNRVSNVLSHIGSVDAKDFGRVSGLTMKDIIREAAREGHDLLSADNPSAVLKELEGLIQNTIRSKWHEVLE

SEQ ID NO: 2699 - DNA, 1038 bp, synthetic construct
  misc_feature 1..1038: note = variant of RNA ligase 2 from Klebsiella phage KP179
  source 1..1038: mol_type = other DNA
atgcatcaccatcaccatcacggtggcagcaacatgtttgcgtattattcaagtctggaaaaccataccaatgccaagttcattagcaagatccgtggtgcaggcttcctgagccacaccgtggaatgggtagctcgcgagaagattcatggaacgaactttagcgttatcattactccgaccgaaatccagccggccaaacgcacagggccgatcttggaagacgagagcttctttggtcatgaagcgattatgaaaaaatatatggactcgttcaaaaaggtgcagaacatgctgaatgcgatggatcttgttagcgtgcaaatctttggcgaatttgcgggtggtggcattcagaaaggcgtcgattacggcgacaaagatttctatgtgtttgacatcctgtctgatagcgggaacgagaaagtttactgggatgactatcgcgtcgaatcgttttgcaccactgtgggtctgaaaatggcgcctctgctgggacgtggtagtttcgctgaactgtcccagtacccaaacgatttcaaaagcctggtgaaccgttataatgaattggttgatacggtcggcctggagatggccaataaacacgtctttggtccgcaagcgtcttctgaaactggctgcgcagaaggctacgttcttaaacccgtctatccgcgcttctttaatgtgggtacgcgcgtggcgattaaatgcaagaactccaaattttcggagaaagcctttctgattgaaccaattaaagcgaaggttgaactgacggagaacgataaacgtctgctcggaatctttagcgaatatgttacctggaaccgcgtcagtaacgtactgtcacatattggctcagtggatgccaaagattttgggcgtgtttcgggtctgacgatgaaagacatcattcgcgaagcagcacgcgaaggccatgatctgttgtctgctgataacccgagcgcggtgctgaaggagctgaccggcctcatccagaacacgattcgctccaaatggcacgaagttctggag

SEQ ID NO: 2700 - protein, 346 aa, synthetic construct
  REGION 1..346: note = variant of RNA ligase 2 from Klebsiella phage KP179
MHHHHHHGGSNMFAYYSSLENHTNAKFISKIRGAGFLSHTVEWVAREKIHGTNFSVIITPTEIQPAKRTGPILEDESFFGHEAIMKKYMDSFKKVQNMLNAMDLVSVQIFGEFAGGGIQKGVDYGDKDFYVFDILSDSGNEKVYWDDYRVESFCTTVGLKMAPLLGRGSFAELSQYPNDFKSLVNRYNELVDTVGLEMANKHVFGPQASSETGCAEGYVLKPVYPRFFNVGTRVAIKCKNSKFSEKAFLIEPIKAKVELTENDKRLLGIFSEYVTWNRVSNVLSHIGSVDAKDFGRVSGLTMKDIIREAAREGHDLLSADNPSAVLKELTGLIQNTIRSKWHEVLE

SEQ ID NO: 2701 - DNA, 1038 bp, synthetic construct
  misc_feature 1..1038: note = variant of RNA ligase 2 from Klebsiella phage KP179
  source 1..1038: mol_type = other DNA
atgcatcaccatcaccatcacggtggcagcaacatgtttgcgtattattcaagtctggaaaaccataccaatgccaagttcattagcaagatccgtggtgcaggcttcctgagccacaccgtggaatgggtagctcgcgagaagattcatggaacgaactttagcgttatcattactccgaccgaaatcgtgccggccaaacgcacagggccgatcttggaagacgagagcttctttggtcatgaaattatcatgaaaaaatatatggactccttcaaaaaggtgcagaacatgctgaatgcgatggatcttgttagcgtgcaaatctttggcgaatttgcgggtggtggcattcagaaaggctttgattacggagacaaagatttctatgtgtttgacatcctgtctgatagcgggaacgagaaagtttactgggatgactatcgcgtcgaatcgttttgcaccactgtgggtctgaaattagcgcctctgctgggacgtggtagtttcgctgaactgtcccagtacccaaacgatttcaaaagcctggtgaaccgttataatgaattggttgaaacggtcggcctggagatggccaataaacacgtctttggtccgcaagcgtcttctgaagaaggcctggcagaaggctacgttcttaaacccgtctatccgcgcttctttaatgtgggtacgcgcgtggcgattaaatgcaagaactccaaattttcggagaaagcctttctgattgaaccaattaaagcgaaggttgaactgacggagaacgataaacgtctgctcggaatctttagcgaatatgttacctggaaccgcgtcagtaacgtactgtcacatattggctcagtgaccgccaaagattttggccgtgtttcgggtctgacgatgaaagacatcattcgcgaagcagcacgcgaaggccatgatctgttgttcgctgataacccgtcggcggtgctgaaggagctgacaggcctcatccagaacacgattcgctccaaatggcacgaagttctggag

SEQ ID NO: 2702 - protein, 346 aa, synthetic construct
  REGION 1..346: note = variant of RNA ligase 2 from Klebsiella phage KP179
MHHHHHHGGSNMFAYYSSLENHTNAKFISKIRGAGFLSHTVEWVAREKIHGTNFSVIITPTEIVPAKRTGPILEDESFFGHEIIMKKYMDSFKKVQNMLNAMDLVSVQIFGEFAGGGIQKGFDYGDKDFYVFDILSDSGNEKVYWDDYRVESFCTTVGLKLAPLLGRGSFAELSQYPNDFKSLVNRYNELVETVGLEMANKHVFGPQASSEEGLAEGYVLKPVYPRFFNVGTRVAIKCKNSKFSEKAFLIEPIKAKVELTENDKRLLGIFSEYVTWNRVSNVLSHIGSVTAKDFGRVSGLTMKDIIREAAREGHDLLFADNPSAVLKELTGLIQNTIRSKWHEVLE

SEQ ID NO: 2703 - DNA, 1038 bp, synthetic construct
  misc_feature 1..1038: note = variant of RNA ligase 2 from Klebsiella phage KP179
  source 1..1038: mol_type = other DNA
atgcatcaccatcaccatcacggtggcagcaacatgtttgcgtattattcaagtctggaaaaccataccaatgccaagttcattagcaagatccgtggtgcaggcttcctgagccacaccgtggaatgggtagctcgcgagaagattcatggaacgaactttagcgttatcattactccgaccgaaatccagccggccaaacgcacagggccgatcttggaagacgagagcttctttggtcatgaagcgattatgaaaaaatatatggacgcgttcaaaaaggtgcagaacatgctgaatgcgatggatcttgttagcgtgcaaatctttggcgaatttgcgggtggtggcattcagaaaggcgtcgattacggagacaaagatttctatgtgtttgacatcctgtctgatagcgggaacgagaaagtttactgggatgactatcgcgtcgaatcgttttgcaccactgtgggtctgaaactggcgcctctgctgggacgtggtagtttcgctgaactgtcccagtacccaaacgatttcaaaagcctggtgaaccgttataatgaattggttgaaacggtcggcctggagatggccaataaacacgtctttggtccgcaagcgtcttctgaaactggctgcgcagaaggctacgttcttaaacccgtctatccgcgcttctttaatgtgggtacgcgcgtggcgattaaatgcaagaactccaaattttcggagaaagcctttctgattgaaccaattaaagcgaaggttgaactgacggagaacgataaacgtctgctcggaatctttagcgaatatgttacctggaaccgcgtcagtaacgtactgtcacatattggctcagtgaccgccaaagattttgggcgtgtttcgggtctgacgatgaaagacatcattcgcgaagcagcacgcgaaggccatgatctgttgttcgctgataacccgtcggcggtgctgaaggagctggaaggcctcatccagaacacgattcgctccaaatggcacgaagttctggag

SEQ ID NO: 2704 - protein, 346 aa, synthetic construct
  REGION 1..346: note = variant of RNA ligase 2 from Klebsiella phage KP179
MHHHHHHGGSNMFAYYSSLENHTNAKFISKIRGAGFLSHTVEWVAREKIHGTNFSVIITPTEIQPAKRTGPILEDESFFGHEAIMKKYMDAFKKVQNMLNAMDLVSVQIFGEFAGGGIQKGVDYGDKDFYVFDILSDSGNEKVYWDDYRVESFCTTVGLKLAPLLGRGSFAELSQYPNDFKSLVNRYNELVETVGLEMANKHVFGPQASSETGCAEGYVLKPVYPRFFNVGTRVAIKCKNSKFSEKAFLIEPIKAKVELTENDKRLLGIFSEYVTWNRVSNVLSHIGSVTAKDFGRVSGLTMKDIIREAAREGHDLLFADNPSAVLKELEGLIQNTIRSKWHEVLE

SEQ ID NO: 2705 - DNA, 1038 bp, synthetic construct
  misc_feature 1..1038: note = variant of RNA ligase 2 from Klebsiella phage KP179
  source 1..1038: mol_type = other DNA
atgcatcaccatcaccatcacggtggcagcaacatgtttgcgtattattcaagtctggaaaaccataccaatgccaagttcattagcaagatccgtggtgcaggcttcctgagccacaccgtggaatgggtagctcgcgagaagattcatggaacgaactttagcgttatcattactccgaccgaaatcgtgccggccaaacgcacagggccgatcttggaagacgagagcttctttggtcatgaagcgattatgaaaaaatatatggacgcgttcaaaaaggtgcagaacatgctgaatgcgatggatcttgttagcgtgcaaatctttggcgaatttgcgggtggtggcattcagaaaggcgtcgattacggcgacaaagatttctatgtgtttgacatcctgtctgatagcgggaacgagaaagtttactgggatgactatcgcgtcgaatcgttttgcaccactgtgggtctgaaaatggcgcctctgctgggacgtggtagtttcgctgaactgtcccagtacccaaacgatttccgtagcctggtgaaccgttataatgaattggttgatacggtcggcctggagatggccaataaacacgtctttggtccgcaagcgtcttctgaaactggcctggcagaaggctacgttcttaaacccgtctatccgcgcttctttaatgtgggtacgcgcgtggcgattaaatgcaagaactccaaattttcggagaaagcctttctgattgaaccaattaaagcgaaggttgaactgacggagaacgataaacgtctgctcggaatctttagcgaatatgttacctggaaccgcgtcagtaacgtactgtcacatattggctcagtggatgccaaagattttgggcgtgtttcgggtctgacgatgaaagacatcattcgcgaagcagcacgcgaaggccatgatctgttgtctgctgataacccgagcgcggtgctgaaggagctgaccggcctcatccagaacacgattcgctccaaatggcacgaagttctggag

SEQ ID NO: 2706 - protein, 346 aa, synthetic construct
  REGION 1..346: note = variant of RNA ligase 2 from Klebsiella phage KP179
MHHHHHHGGSNMFAYYSSLENHTNAKFISKIRGAGFLSHTVEWVAREKIHGTNFSVIITPTEIVPAKRTGPILEDESFFGHEAIMKKYMDAFKKVQNMLNAMDLVSVQIFGEFAGGGIQKGVDYGDKDFYVFDILSDSGNEKVYWDDYRVESFCTTVGLKMAPLLGRGSFAELSQYPNDFRSLVNRYNELVDTVGLEMANKHVFGPQASSETGLAEGYVLKPVYPRFFNVGTRVAIKCKNSKFSEKAFLIEPIKAKVELTENDKRLLGIFSEYVTWNRVSNVLSHIGSVDAKDFGRVSGLTMKDIIREAAREGHDLLSADNPSAVLKELTGLIQNTIRSKWHEVLE

SEQ ID NO: 2707 - DNA, 1038 bp, synthetic construct
  misc_feature 1..1038: note = variant of RNA ligase 2 from Klebsiella phage KP179
  source 1..1038: mol_type = other DNA
atgcatcaccatcaccatcacggtggcagcaacatgtttgcgtattattcaagtctggaaaaccataccaatgccaagttcattagcaagatccgtggtgcaggcttcctgagccacaccgtggaatgggtagctcgcgagaagattcatggaacgaactttagcgttatcattactccgaccgaaatcgtgccggccaaacgcacagggccgatcttggaagacgagagcttctttggtcatgaaattatcatgaaaaaatatatggacgcgttcaaaaaggtgcagaacatgctgaatgcgatggatcttgttagcgtgcaaatctttggcgaatttgcgggtggtggcattcagaaaggcgtcgattacggcgacaaagatttctatgtgtttgacatcctgtctgatagcgggaacgagaaagtttactgggatgactatcgcgtcgaatcgttttgcaccactgtgggtctgaaagtggcgcctctgctgggacgtggtagtttcgctgaactgtcccagtacccaaacgatttcaaaagcctggtgaaccgttataatgaattggttgaaacggtcggcctggagatggccaataaacacgtctttggtccgcaagcgtcttctgaaactggctgcgcagaaggctacgttcttaaacccgtctatccgcgcttctttaatgtgggtacgcgcgtggcgattaaatgcaagaactccaaattttcggagaaagcctttctgattgaaccaattaaagcgaaggttgaactgacggagaacgataaacgtctgctcggaatcttaagcgaatatgttacctggaaccgcgtcagtaacgtactgtcacatattggctcagtggatgccaaagattttgggcgtgtttcgggtctgacgatgaaagacatcattcgcgaagcagcacgcgaaggccatgatctgttgttcgctgataacccgtcggcggtgctgaaggagctgaccggcctcatccagaacacgattcgctccaaatggcacgaagttctggag

SEQ ID NO: 2708 - protein, 346 aa, synthetic construct
  REGION 1..346: note = variant of RNA ligase 2 from Klebsiella phage KP179
MHHHHHHGGSNMFAYYSSLENHTNAKFISKIRGAGFLSHTVEWVAREKIHGTNFSVIITPTEIVPAKRTGPILEDESFFGHEIIMKKYMDAFKKVQNMLNAMDLVSVQIFGEFAGGGIQKGVDYGDKDFYVFDILSDSGNEKVYWDDYRVESFCTTVGLKVAPLLGRGSFAELSQYPNDFKSLVNRYNELVETVGLEMANKHVFGPQASSETGCAEGYVLKPVYPRFFNVGTRVAIKCKNSKFSEKAFLIEPIKAKVELTENDKRLLGILSEYVTWNRVSNVLSHIGSVDAKDFGRVSGLTMKDIIREAAREGHDLLFADNPSAVLKELTGLIQNTIRSKWHEVLE

SEQ ID NO: 2709 - DNA, 1038 bp, synthetic construct
  misc_feature 1..1038: note = variant of RNA ligase 2 from Klebsiella phage KP179
  source 1..1038: mol_type = other DNA
atgcatcaccatcaccatcacggtggcagcaacatgtttgcgtattattcaagtctggaaaaccataccaatgccaagttcattagcaagatccgtggtgcaggcttcctgagccacaccgtggaatgggtagctcgcgagaagattcatggaacgaactttagcgttatcattactccgaccgaaatcgtgccggccaaacgcacagggccgatcttggaagacgagagcttctttggtcatgaaattatcatgaaaaaatatatggacgcgttcaaaaaggtgcagaacatgctgaatgcgatggatcttgttagcgtgcaaatctttggcgaatttgcgggtggtggcattcagaaaggcgtcgattacggcgacaaagatttctatgtgtttgacatcctgtctgatagcgggaacgagaaagtttactgggatgactatcgcgtcgaatcgttttgcaccactgtgggtctgaaagtggcgcctctgctgggacgtggtagtttcgctgaactgtcccagtacccaaacgatttccctagcctggtgaaccgttataatgaattggttgatacggtcggcctggagatggccaataaacacgtctttggtccgcaagcgtcttctgaaactggcctggcagaaggctacgttcttaaacccgtctatccgcgcttctttaatgtgggtacgcgcgtggcgattaaatgcaagaactccaaattttcggagaaagcctttctgattgaaccaattaaagcgaaggttgaactgacggagaacgataaacgtctgctcggaatctttagcgaatatgttacctggaaccgcgtcagtaacgtactgtcacatattggctcagtggatgccaaagattttgggcgtgtttcgggtctgacgatgaaagacatcattcgcgaagcagcacgcgaaggccatgatctgttgttcgctgataacccgtcggcggtgctgaaggagctggaaggcctcatccagaacacgattcgctccaaatggcacgaagttctggag

SEQ ID NO: 2710 - protein, 346 aa, synthetic construct
  REGION 1..346: note = variant of RNA ligase 2 from Klebsiella phage KP179
MHHHHHHGGSNMFAYYSSLENHTNAKFISKIRGAGFLSHTVEWVAREKIHGTNFSVIITPTEIVPAKRTGPILEDESFFGHEIIMKKYMDAFKKVQNMLNAMDLVSVQIFGEFAGGGIQKGVDYGDKDFYVFDILSDSGNEKVYWDDYRVESFCTTVGLKVAPLLGRGSFAELSQYPNDFPSLVNRYNELVDTVGLEMANKHVFGPQASSETGLAEGYVLKPVYPRFFNVGTRVAIKCKNSKFSEKAFLIEPIKAKVELTENDKRLLGIFSEYVTWNRVSNVLSHIGSVDAKDFGRVSGLTMKDIIREAAREGHDLLFADNPSAVLKELEGLIQNTIRSKWHEVLE

SEQ ID NO: 2711 - DNA, 1038 bp, synthetic construct
  misc_feature 1..1038: note = variant of RNA ligase 2 from Klebsiella phage KP179
  source 1..1038: mol_type = other DNA
atgcatcaccatcaccatcacggtggcagcaacatgtttgcgtattattcaagtctggaaaaccataccaatgccaagttcattagcaagatccgtggtgcaggcttcctgagccacaccgtggaatgggtagctcgcgagaagattcatggaacgaactttagcgttatcattactccgaccgaaatcgtgccggccaaacgcacagggccgatcttggaagacgagagcttctttggtcatgaagcgattatgaaaaaatatatggacgcgttcaaaaaggtgcagaacatgctgaatgcgatggatcttgttagcgtgcaaatctttggcgaatttgcgggtggtggcattcagaaaggcgtcgattacaaagacaaagatttctatgtgtttgacatcctgtctgatagcgggaacgagaaagtttactgggatgactatcgcgtcgaatcgttttgcaccactgtgggtctgaaaatggcgcctctgctgggacgtggtagtttcgctgaactgtcccagtacccaaacgatttcaaaagcctggtgaaccgttataatgaattggttgatacggtcggcctggagatggccaataaacacgtctttggtccgcaagcgtcttctgaaactggcctggcagaaggctacgttcttaaacccgtctatccgcgcttctttaatgtgggtacgcgcgtggcgattaaatgcaagaactccaaattttcggagaaagcctttctgattgaaccaattaaagcgaaggttgaactgacggagaacgataaacgtctgctcggaatcttaagcgaatatgttacctggaaccgcgtcagtaacgtactgtcacatattggctcagtgaccgccaaagattttgggcgtgtttcgggtctgacgatgaaagacatcattcgcgaagcagcacgcgaaggccatgatctgttgttcgctgataacccgtcggcggtgctgaaggagctgacaggcctcatccagaacacgattcgctccaaatggcacgaagttctggag

SEQ ID NO: 2712 - protein, 346 aa, synthetic construct
  REGION 1..346: note = variant of RNA ligase 2 from Klebsiella phage KP179
MHHHHHHGGSNMFAYYSSLENHTNAKFISKIRGAGFLSHTVEWVAREKIHGTNFSVIITPTEIVPAKRTGPILEDESFFGHEAIMKKYMDAFKKVQNMLNAMDLVSVQIFGEFAGGGIQKGVDYKDKDFYVFDILSDSGNEKVYWDDYRVESFCTTVGLKMAPLLGRGSFAELSQYPNDFKSLVNRYNELVDTVGLEMANKHVFGPQASSETGLAEGYVLKPVYPRFFNVGTRVAIKCKNSKFSEKAFLIEPIKAKVELTENDKRLLGILSEYVTWNRVSNVLSHIGSVTAKDFGRVSGLTMKDIIREAAREGHDLLFADNPSAVLKELTGLIQNTIRSKWHEVLE

SEQ ID NO: 2713 - DNA, 1038 bp, synthetic construct
  misc_feature 1..1038: note = variant of RNA ligase 2 from Klebsiella phage KP179
  source 1..1038: mol_type = other DNA
atgcatcaccatcaccatcacggtggcagcaacatgtttgcgtattattcaagtctggaaaaccataccaatgccaagttcattagcaagatccgtggtgcaggcttcctgagccacaccgtggaatgggtagctcgcgagaagattcatggaacgaactttagcgttatcattactccgaccgaaatcgtgccggccaaacgcacagggccgatcttggaagacgagagcttctttggtcatgaaattatcatgaaaaaatatatggactcgttcaaaaaggtgcagaacatgctgaatgcgatggatcttgttagcgtgcaaatctttggcgaatttgcgggtggtggcattcagaaaggcgtcgattacggcgacaaagatttctatgtgtttgacatcctgtctgatagcgggaacgagaaagtttactgggatgactatcgcgtcgaatcgttttgcaccactgtgggtctgaaaatggcgcctctgctgggacgtggtagtttcgctgaactgtcccagtacccaaacgatttcaaaagcctggtgaaccgttataatgaattggttgatacggtcggcctggagatggccaataaacacgtctttggtccgcaagcgtcttctgaaactggcctggcagaaggctacgttcttaaacccgtctatccgcgcttctttaatgtgggtacgcgcgtggcgattaaatgcaagaactccaaattttcggagaaagcctttctgattgaaccaattaaagcgaaggttgaactgacggagaacgataaacgtctgctcggaatctttagcgaatatgttacctggaaccgcgtcagtaacgtactgtcacatattggctcagtggatgccaaagattttgggcgtgtttcgggtctgacgatgaaagacatcattcgcgaagcagcacgcgaaggccatgatctgttgttcgctgataacccgtcggcggtgctgaaggagctggaaggcctcatccagaacacgattcgctccaaatggcacgaagttctggag

SEQ ID NO: 2714 - protein, 346 aa, synthetic construct
  REGION 1..346: note = variant of RNA ligase 2 from Klebsiella phage KP179
MHHHHHHGGSNMFAYYSSLENHTNAKFISKIRGAGFLSHTVEWVAREKIHGTNFSVIITPTEIVPAKRTGPILEDESFFGHEIIMKKYMDSFKKVQNMLNAMDLVSVQIFGEFAGGGIQKGVDYGDKDFYVFDILSDSGNEKVYWDDYRVESFCTTVGLKMAPLLGRGSFAELSQYPNDFKSLVNRYNELVDTVGLEMANKHVFGPQASSETGLAEGYVLKPVYPRFFNVGTRVAIKCKNSKFSEKAFLIEPIKAKVELTENDKRLLGIFSEYVTWNRVSNVLSHIGSVDAKDFGRVSGLTMKDIIREAAREGHDLLFADNPSAVLKELEGLIQNTIRSKWHEVLE

SEQ ID NO: 2715 - DNA, 1038 bp, synthetic construct
  misc_feature 1..1038: note = variant of RNA ligase 2 from Klebsiella phage KP179
  source 1..1038: mol_type = other DNA
atgcatcaccatcaccatcacggtggcagcaacatgtttgcgtattattcaagtctggaaaaccataccaatgccaagttcgttagcaagatccgtggtgcaggcttcctgagccacaccgtggaatgggtagctcgcgagaagattcatggaacgaactttagcgttatcattactccgaccgaaatcgtgccggccaaacgcacagggccgatcttggaagacgagagcttctttggtcatgaaattatcatgaaaaaatatatggactccttcaaaaaggtgcagaacatgctgaatgcgatggatcttgttagcgtgcaaatctttggcgaatttgcgggtggtggcattcagaaaggcgttgattacggagacaaagatttctatgtgtttgacatcctgtctgatagcgggaacgagaaagtttactgggatgactatcgcgtcgaatcgttttgcaccactgttggtctgaaattagcgcctctgctgggacgtggtagtttcgctgaactgtcccagtacccaaacgatttcaaaagcctggtgaaccgttataatgaattggttgatacggtcggcctggagatggccaataaacacgtctttggtccgcaagcgtcttctgaagaaggcctggcagaaggctacgttcttaaacccgtctatccgcgcttctttaatgtgggtacgcgcgtggcgattaaatgcaagaactccaaattttcggagaaagcctttctgattgaaccaattaaagcgaaggttgaactgacggagaacgataaacgtctgctcggaatctttagcgaatatgttacctggaaccgcgtcagtaacgtactgtcacatattggctcagtgaccgccaaagattttggccgtgtttcgggtctgacgatgaaagacatcattcgcgaagcagcacgcgaaggccatgatctgttgttcgctgataacccgtcggcggtgctgaaggagctgacaggcctcatccagaacacgattcgctccaaatggcacgaagttctggag

SEQ ID NO: 2716 - protein, 346 aa, synthetic construct
  REGION 1..346: note = variant of RNA ligase 2 from Klebsiella phage KP179
MHHHHHHGGSNMFAYYSSLENHTNAKFVSKIRGAGFLSHTVEWVAREKIHGTNFSVIITPTEIVPAKRTGPILEDESFFGHEIIMKKYMDSFKKVQNMLNAMDLVSVQIFGEFAGGGIQKGVDYGDKDFYVFDILSDSGNEKVYWDDYRVESFCTTVGLKLAPLLGRGSFAELSQYPNDFKSLVNRYNELVDTVGLEMANKHVFGPQASSEEGLAEGYVLKPVYPRFFNVGTRVAIKCKNSKFSEKAFLIEPIKAKVELTENDKRLLGIFSEYVTWNRVSNVLSHIGSVTAKDFGRVSGLTMKDIIREAAREGHDLLFADNPSAVLKELTGLIQNTIRSKWHEVLE

SEQ ID NO: 2717 - DNA, 1038 bp, synthetic construct
  misc_feature 1..1038: note = variant of RNA ligase 2 from Klebsiella phage KP179
  source 1..1038: mol_type = other DNA
atgcatcaccatcaccatcacggtggcagcaacatgtttgcgtattattcaagtctggaaaaccataccaatgccaagttcattagcaagatccgtggtgcaggcttcctgagccacaccgtggaatgggtagctcgcgagaagattcatggaacgaactttagcgttatcattactccgaccgaaatcgtgccggccaaacgcacagggccgatcttggaagacgagagcttctttggtcatgaaattatcatgaaaaaatatatggactccttcaaaaaggtgcagaacatgctgaatgcgatggatcttgttagcgtgcaaatctttggcgaatttgcgggtggtggcattcagaaaggctttgattacggagacaaagatttctatgtgtttgacatcctgtctgatagcgggaacgagaaagtgtactgggatgactatcgcgtcgaatcgttttgcaccactgtgggtctgaaattagcgcctctgctgggacgtggtagtttcgctgaactgtcccagtacccaaacgatttcaaaagcctggtgaaccgttataatgaattggttgatacggtcggcctggagatggccaataaacacgtctttggtccgcaagcgtcttctgaagaaggcctggcagaaggctacgttcttaaacccgtctatccgcgcttctttaatgtgggtacgcgcgtggcgattaaatgcaagaactccaaattttcggagaaagcctttctgattgaaccaattaaagcgaaggttgaactgacggagaacgataaacgtctgctcggaatctttagcgaatatgttacctggaaccgcgtcagtaacgtactgtcacatattggctcagtgaccgccaaagattttgggcgtgtttcgggtctgacgatgaaagacatcattcgcgaagcagcacgcgaaggccatgatctgttgttcgctgataacccgtcggcggtgctgaaggagctgacaggcctcatccagaacacgattcgctccaaatggcacgaagttctggag

SEQ ID NO: 2718 - protein, 346 aa, synthetic construct
  REGION 1..346: note = variant of RNA ligase 2 from Klebsiella phage KP179
MHHHHHHGGSNMFAYYSSLENHTNAKFISKIRGAGFLSHTVEWVAREKIHGTNFSVIITPTEIVPAKRTGPILEDESFFGHEIIMKKYMDSFKKVQNMLNAMDLVSVQIFGEFAGGGIQKGFDYGDKDFYVFDILSDSGNEKVYWDDYRVESFCTTVGLKLAPLLGRGSFAELSQYPNDFKSLVNRYNELVDTVGLEMANKHVFGPQASSEEGLAEGYVLKPVYPRFFNVGTRVAIKCKNSKFSEKAFLIEPIKAKVELTENDKRLLGIFSEYVTWNRVSNVLSHIGSVTAKDFGRVSGLTMKDIIREAAREGHDLLFADNPSAVLKELTGLIQNTIRSKWHEVLE

SEQ ID NO: 2719 - DNA, 1038 bp, synthetic construct
  misc_feature 1..1038: note = variant of RNA ligase 2 from Klebsiella phage KP179
  source 1..1038: mol_type = other DNA
atgcatcaccatcaccatcacggtggcagcaacatgtttgcgtattattcaagtctggaaaaccataccaatgccaagttcgttagcaagatccgtggtgcaggcttcctgagccacaccgtggaatgggtagctcgcgagaagattcatggaacgaactttagcgttatcattactccgaccgaaatccagccggccaaacgcacagggccgatcttggaagacgagagcttctttggtcatgaagcgatcatgaaaaaatatatggactccttcaaaaaggtgcagaacatgctgaatgcgatggatcttgttagcgtgcaaatctttggcgaatttgcgggtggtggcattcagaaaggctttgattacggagacaaagatttctatgtgtttgacatcctgtctgatagcgggaacgagaaaagctactgggatgactatcgcgtcgaatcgttttgcaccactgttggtctgaaattagcgcctctgctgggacgtggtagtttcgctgaactgtcccagtacccaaacgatttcaaaagcctggtgaaccgttataatgaattggttgaaacggtcggcctggagatggccaataaacacgtctttggtccgcaagcgtcttctgaagaaggcctggcagaaggctacgttcttaaacccgtctatccgcgcttctttaatgtgggtacgcgcgtggcgattaaatgcaagaactccaaattttcggagaaagcctttctgattgaaccaattaaagcgaaggttgaactgacggagaacgataaacgtctgctcggaatctttagcgaatatgttacctggaaccgcgtcagtaacgtactgtcacatattggctcagtgaccgccaaagattttgtccgtgtttcgggtctgacgatgaaagacatcattcgcgaagcagcacgcgaaggccatgatctgttgtctgctgataacccgagcgcggtgctgaaggagctgacaggcctcatccagaacacgattcgctccaaatggcacgaagttctggag

SEQ ID NO: 2720 - protein, 346 aa, synthetic construct
  REGION 1..346: note = variant of RNA ligase 2 from Klebsiella phage KP179
MHHHHHHGGSNMFAYYSSLENHTNAKFVSKIRGAGFLSHTVEWVAREKIHGTNFSVIITPTEIQPAKRTGPILEDESFFGHEAIMKKYMDSFKKVQNMLNAMDLVSVQIFGEFAGGGIQKGFDYGDKDFYVFDILSDSGNEKSYWDDYRVESFCTTVGLKLAPLLGRGSFAELSQYPNDFKSLVNRYNELVETVGLEMANKHVFGPQASSEEGLAEGYVLKPVYPRFFNVGTRVAIKCKNSKFSEKAFLIEPIKAKVELTENDKRLLGIFSEYVTWNRVSNVLSHIGSVTAKDFVRVSGLTMKDIIREAAREGHDLLSADNPSAVLKELTGLIQNTIRSKWHEVLE

SEQ ID NO: 2721 - DNA, 1038 bp, synthetic construct
  misc_feature 1..1038: note = variant of RNA ligase 2 from Klebsiella phage KP179
  source 1..1038: mol_type = other DNA
atgcatcaccatcaccatcacggtggcagcaacatgtttgcgtattattcaagtctggaaaaccataccaatgccaagttcattagcaagatccgtggtgcaggcttcctgagccacaccgtggaatgggtagctcgcgagaagattcatggaacgaactttagcgttatcattactccgaccgaaatcgtgccggccaaacgcacagggccgatcttggaagacgagagcttctttggtcatgaaattatcatgaaaaaatatatggactccttcaaaaaggtgcagaacatgctgaatgcgatggatcttgttagcgtgcaaatctttggcgaatttgcgggtggtggcattcagaaaggctttgattacggagacaaagatttctatgtgtttgacatcctgtctgatagcgggaacgagaaagtgtactgggatgactatcgcgtcgaatcgttttgcaccactgttggtctgaaattagcgcctctgctgggacgtggtagtttcgctgaactgtcccagtacccaaacgatttcaaaagcctggtgaaccgttataatgaattggttgatacggtcggcctggagatggccaataaacacgtctttggtccgcaagcgtcttctgaaaccggcctggcagaaggctacgttcttaaacccgtctatccgcgcttctttaatgtgggtacgcgcgtggcgattaaatgcaagaactccaaattttcggagaaagcctttctgattgaaccaattaaagcgaaggttgaactgacggagaacgataaacgtctgctcggaatctttagcgaatatgttacctggaaccgcgtcagtaacgtactgtcacatattggctcagtgaccgccaaagattttgtccgtgtttcgggtctgacgatgaaagacatcattcgcgaagcagcacgcgaaggccatgatctgttgttcgctgataacccgtcggcggtgctgaaggagctgacaggcctcatccagaacacgattcgctccaaatggcacgaagttctggag

SEQ ID NO: 2722 - protein, 346 aa, synthetic construct
  REGION 1..346: note = variant of RNA ligase 2 from Klebsiella phage KP179
MHHHHHHGGSNMFAYYSSLENHTNAKFISKIRGAGFLSHTVEWVAREKIHGTNFSVIITPTEIVPAKRTGPILEDESFFGHEIIMKKYMDSFKKVQNMLNAMDLVSVQIFGEFAGGGIQKGFDYGDKDFYVFDILSDSGNEKVYWDDYRVESFCTTVGLKLAPLLGRGSFAELSQYPNDFKSLVNRYNELVDTVGLEMANKHVFGPQASSETGLAEGYVLKPVYPRFFNVGTRVAIKCKNSKFSEKAFLIEPIKAKVELTENDKRLLGIFSEYVTWNRVSNVLSHIGSVTAKDFVRVSGLTMKDIIREAAREGHDLLFADNPSAVLKELTGLIQNTIRSKWHEVLE

SEQ ID NO: 2723 - DNA, 1038 bp, synthetic construct
  misc_feature 1..1038: note = variant of RNA ligase 2 from Klebsiella phage KP179
  source 1..1038: mol_type = other DNA
atgcatcaccatcaccatcacggtggcagcaacatgtttgcgtattattcaagtctggaaaaccataccaatgccaagttcattagcaagatccgtggtgcaggcttcctgagccacaccgtggaatgggtagctcgcgagaagattcatggaacgaactttagcgttatcattactccgaccgaaatcgtgccggccaaacgcacagggccgatcttggaagacgagagcttctttggtcatgaaattatcatgaaaaaatatatggacgcgttcaaaaaggtgcagaacatgctgaatgcgatggatcttgttagcgtgcaaatctttggcgaatttgcgggtggtggcattcagaaaggcgtcgattacggcgacaaagatttctatgtgtttgacatcctgtctgatagcgggaacgagaaagtttactgggatgactatcgcgtcgaatcgttttgcaccactgtgggtctgaaagtggcgcctctgctgggacgtggtagtttcgctgaactgtcccagtacccaaacgatttcaaaagcctggtgaaccgttataatgaattggttgaaacggtcggcctggagatggccaataaacacgtctttggtccgcaagcgtcttctgaaactggcctggcagaaggctacgttcttaaacccgtctatccgcgcttctttaatgtgggtacgcgcgtggcgattaaatgcaagaactccaaattttcggagaaagcctttctgattgaaccaattaaagcgaaggttgaactgacggagaacgataaacgtctgctcggaatctttagcgaatatgttacctggaaccgcgtcagtaacgtactgtcacatattggctcagtgaccgccaaagattttgggcgtgtttcgggtctgacgatgaaagacatcattcgcgaagcagcacgcgaaggccatgatctgttgtctgctgataacccgagcgcggtgctgaaggagctgaccggcctcatccagaacacgattcgctccaaatggcacgaagttctggag

SEQ ID NO: 2724 - protein, 346 aa, synthetic construct
  REGION 1..346: note = variant of RNA ligase 2 from Klebsiella phage KP179
MHHHHHHGGSNMFAYYSSLENHTNAKFISKIRGAGFLSHTVEWVAREKIHGTNFSVIITPTEIVPAKRTGPILEDESFFGHEIIMKKYMDAFKKVQNMLNAMDLVSVQIFGEFAGGGIQKGVDYGDKDFYVFDILSDSGNEKVYWDDYRVESFCTTVGLKVAPLLGRGSFAELSQYPNDFKSLVNRYNELVETVGLEMANKHVFGPQASSETGLAEGYVLKPVYPRFFNVGTRVAIKCKNSKFSEKAFLIEPIKAKVELTENDKRLLGIFSEYVTWNRVSNVLSHIGSVTAKDFGRVSGLTMKDIIREAAREGHDLLSADNPSAVLKELTGLIQNTIRSKWHEVLE

SEQ ID NO: 2725 - DNA, 1038 bp, synthetic construct
  misc_feature 1..1038: note = variant of RNA ligase 2 from Klebsiella phage KP179
  source 1..1038: mol_type = other DNA
atgcatcaccatcaccatcacggtggcagcaacatgtttgcgtattattcaagtctggaaaaccataccaatgccaagttcgttagcaagatccgtggtgcaggcttcctgagccacaccgtggaatgggtagctcgcgagaagattcatggaacgaactttagcgttatcattactccgaccgaaatcgtgccggccaaacgcacagggccgatcttggaagacgagagcttctttggtcatgaaattatcatgaaaaaatatatggactccttcaaaaaggtgcagaacatgctgaatgcgatggatcttgttagcgtgcaaatctttggcgaatttgcgggtggtggcattcagaaaggctttgattacggagacaaagatttctatgtgtttgacatcctgtctgatagcgggaacgagaaaagctactgggatgactatcgcgtcgaatcgttttgcaccactgtgggtctgaaattagcgcctctgctgggacgtggtagtttcgctgaactgtcccagtacccaaacgatttcaaaagcctggtgaaccgttataatgaattggttgatacggtcggcctggagatggccaataaacacgtctttggtccgcaagcgtcttctgaagaaggcctggcagaaggctacgttcttaaacccgtctatccgcgcttctttaatgtgggtacgcgcgtggcgattaaatgcaagaactccaaattttcggagaaagcctttctgattgaaccaattaaagcgaaggttgaactgacggagaacgataaacgtctgctcggaatctttagcgaatatgttacctggaaccgcgtcagtaacgtactgtcacatattggctcagtgaccgccaaagattttggccgtgtttcgggtctgacgatgaaagacatcattcgcgaagcagcacgcgaaggccatgatctgttgttcgctgataacccgtcggcggtgctgaaggagctgacaggcctcatccagaacacgattcgctccaaatggcacgaagttctggag

SEQ ID NO: 2726 - protein, 346 aa, synthetic construct
  REGION 1..346: note = variant of RNA ligase 2 from Klebsiella phage KP179
MHHHHHHGGSNMFAYYSSLENHTNAKFVSKIRGAGFLSHTVEWVAREKIHGTNFSVIITPTEIVPAKRTGPILEDESFFGHEIIMKKYMDSFKKVQNMLNAMDLVSVQIFGEFAGGGIQKGFDYGDKDFYVFDILSDSGNEKSYWDDYRVESFCTTVGLKLAPLLGRGSFAELSQYPNDFKSLVNRYNELVDTVGLEMANKHVFGPQASSEEGLAEGYVLKPVYPRFFNVGTRVAIKCKNSKFSEKAFLIEPIKAKVELTENDKRLLGIFSEYVTWNRVSNVLSHIGSVTAKDFGRVSGLTMKDIIREAAREGHDLLFADNPSAVLKELTGLIQNTIRSKWHEVLE

SEQ ID NO: 2727 - DNA, 1038 bp, synthetic construct
  misc_feature 1..1038: note = variant of RNA ligase 2 from Klebsiella phage KP179
  source 1..1038: mol_type = other DNA
atgcatcaccatcaccatcacggtggcagcaacatgtttgcgtattattcaagtctggaaaaccataccaatgccaagttcattagcaagatccgtggtgcaggcttcctgagccacaccgtggaatgggtagctcgcgagaagattcatggaacgaactttagcgttatcattactccgaccgaaatccagccggccaaacgcacagggccgatcttggaagacgagagcttctttggtcatgaaattatcatgaaaaaatatatggactccttcaaaaaggtgcagaacatgctgaatgcgatggatcttgttagcgtgcaaatctttggcgaatttgcgggtggtggcattcagaaaggcgtcgattacggcgacaaagatttctatgtgtttgacatcctgtctgatagcgggaacgagaaagtttactgggatgactatcgcgtcgaatcgttttgcaccactgtgggtctgaaagtggcgcctctgctgggacgtggtagtttcgctgaactgtcccagtacccaaacgatttcaaaagcctggtgaaccgttataatgaattggttgatacggtcggcctggagatggccaataaacacgtctttggtccgcaagcgtcttctgaaactggcctggcagaaggctacgttcttaaacccgtctatccgcgcttctttaatgtgggtacgcgcgtggcgattaaatgcaagaactccaaattttcggagaaagcctttctgattgaaccaattaaagcgaaggttgaactgacggagaacgataaacgtctgctcggaatctttagcgaatatgttacctggaaccgcgtcagtaacgtactgtcacatattggctcagtggatgccaaagattttgggcgtgtttcgggtctgacgatgaaagacatcattcgcgaagcagcacgcgaaggccatgatctgttgttcgctgataacccgtcggcggtgctgaaggagctgacaggcctcatccagaacacgattcgctccaaatggcacgaagttctggag

SEQ ID NO: 2728 - protein, 346 aa, synthetic construct
  REGION 1..346: note = variant of RNA ligase 2 from Klebsiella phage KP179
MHHHHHHGGSNMFAYYSSLENHTNAKFISKIRGAGFLSHTVEWVAREKIHGTNFSVIITPTEIQPAKRTGPILEDESFFGHEIIMKKYMDSFKKVQNMLNAMDLVSVQIFGEFAGGGIQKGVDYGDKDFYVFDILSDSGNEKVYWDDYRVESFCTTVGLKVAPLLGRGSFAELSQYPNDFKSLVNRYNELVDTVGLEMANKHVFGPQASSETGLAEGYVLKPVYPRFFNVGTRVAIKCKNSKFSEKAFLIEPIKAKVELTENDKRLLGIFSEYVTWNRVSNVLSHIGSVDAKDFGRVSGLTMKDIIREAAREGHDLLFADNPSAVLKELTGLIQNTIRSKWHEVLE

SEQ ID NO: 2729 - DNA, 1038 bp, synthetic construct
  misc_feature 1..1038: note = variant of RNA ligase 2 from Klebsiella phage KP179
  source 1..1038: mol_type = other DNA
atgcatcaccatcaccatcacggtggcagcaacatgtttgcgtattattcaagtctggaaaaccataccaatgccaagttcattagcaagatccgtggtgcaggcttcctgagccacaccgtggaatgggtagctcgcgagaagattcatggaacgaactttagcgttatcattactccgaccgaaatccagccggccaaacgcacagggccgatcttggaagacgagagcttctttggtcatgaaattatcatgaaaaaatatatggactccttcaaaaaggtgcagaacatgctgaatgcgatggatcttgttagcgtgcaaatctttggcgaatttgcgggtggtggcattcagaaaggctttgattacggagacaaagatttctatgtgtttgacatcctgtctgatagcgggaacgagaaagtttactgggatgactatcgcgtcgaatcgttttgcaccactgtgggtctgaaattagcgcctctgctgggacgtggtagtttcgctgaactgtcccagtacccaaacgatttcaaaagcctggtgaaccgttataatgaattggttgatacggtcggcctggagatggccaataaacacgtctttggtccgcaaccgtcttctgaaactggcctggcagaaggctacgttcttaaacccgtctatccgcgcttctttaatgtgggtacgcgcgtggcgattaaatgcaagaactccaaattttcggagaaagcctttctgattgaaccaattaaagcgaaggttgaactgacggagaacgataaacgtctgctcggaatctttagcgaatatgttacctggaaccgcgtcagtaacgtactgtcacatattggctcagtgaccgccaaagattttggccgtgtttcgggtctgacgatgaaagacatcattcgcgaagcagcacgcgaaggccatgatctgttgtctgctgataacccgagcgcggtgctgaaggagctgacaggcctcatccagaacacgattcgctccaaatggcacgaagttctggag

SEQ ID NO: 2730 - protein, 346 aa, synthetic construct
  REGION 1..346: note = variant of RNA ligase 2 from Klebsiella phage KP179
MHHHHHHGGSNMFAYYSSLENHTNAKFISKIRGAGFLSHTVEWVAREKIHGTNFSVIITPTEIQPAKRTGPILEDESFFGHEIIMKKYMDSFKKVQNMLNAMDLVSVQIFGEFAGGGIQKGFDYGDKDFYVFDILSDSGNEKVYWDDYRVESFCTTVGLKLAPLLGRGSFAELSQYPNDFKSLVNRYNELVDTVGLEMANKHVFGPQPSSETGLAEGYVLKPVYPRFFNVGTRVAIKCKNSKFSEKAFLIEPIKAKVELTENDKRLLGIFSEYVTWNRVSNVLSHIGSVTAKDFGRVSGLTMKDIIREAAREGHDLLSADNPSAVLKELTGLIQNTIRSKWHEVLE

SEQ ID NO: 2731 - DNA, 1038 bp, synthetic construct
  misc_feature 1..1038: note = variant of RNA ligase 2 from Klebsiella phage KP179
  source 1..1038: mol_type = other DNA
atgcatcaccatcaccatcacggtggcagcaacatgtttgcgtattattcaagtctggaaaaccataccaatgccaagttcattagcaagatccgtggtgcaggcttcctgagccacaccgtggaatgggtagctcgcgagaagattcatggaacgaactttagcgttatcattactccgaccgaaatccagccggccaaacgcacagggccgatcttggaagacgagagcttctttggtcatgaagcgattatgaaaaaatatatggactccttcaaaaaggtgcagaacatgctgaatgcgatggatcttgttagcgtgcaaatctttggcgaatttgcgggtggtggcattcagaaaggcgtcgattacggcgacaaagatttctatgtgtttgacatcctgtctgatagcgggaacgagaaagtttactgggatgactatcgcgtcgaatcgttttgcaccactgtgggtctgaaattagcgcctctgctgggacgtggtagtttcgctgaactgtcccagtacccaaacgatttcaaaagcctggtgaaccgttataatgaattggttgaaacggtcggcctggagatggccaataaacacgtctttggtccgcaagcgtcttctgaaactggcctggcagaaggctacgttcttaaacccgtctatccgcgcttctttaatgtgggtacgcgcgtggcgattaaatgcaagaactccaaattttcggagaaagcctttctgattgaaccaattaaagcgaaggttgaactgacggagaacgataaacgtctgctcggaatctttagcgaatatgttacctggaaccgcgtcagtaacgtactgtcacatattggctcagtggatgccaaagattttgggcgtgtttcgggtctgacgatgaaagacatcattcgcgaagcagcacgcgaaggccatgatctgttgtctgctgataacccgagcgcggtgctgaaggagctgaccggcctcatccagaacacgattcgctccaaatggcacgaagttctggag

SEQ ID NO: 2732 - protein, 346 aa, synthetic construct
  REGION 1..346: note = variant of RNA ligase 2 from Klebsiella phage KP179
MHHHHHHGGSNMFAYYSSLENHTNAKFISKIRGAGFLSHTVEWVAREKIHGTNFSVIITPTEIQPAKRTGPILEDESFFGHEAIMKKYMDSFKKVQNMLNAMDLVSVQIFGEFAGGGIQKGVDYGDKDFYVFDILSDSGNEKVYWDDYRVESFCTTVGLKLAPLLGRGSFAELSQYPNDFKSLVNRYNELVETVGLEMANKHVFGPQASSETGLAEGYVLKPVYPRFFNVGTRVAIKCKNSKFSEKAFLIEPIKAKVELTENDKRLLGIFSEYVTWNRVSNVLSHIGSVDAKDFGRVSGLTMKDIIREAAREGHDLLSADNPSAVLKELTGLIQNTIRSKWHEVLE

SEQ ID NO: 2733 - DNA, 1038 bp, synthetic construct
  misc_feature 1..1038: note = variant of RNA ligase 2 from Klebsiella phage KP179
  source 1..1038: mol_type = other DNA
atgcatcaccatcaccatcacggtggcagcaacatgtttgcgtattattcaagtctggaaaaccataccaatgccaagttcattagcaagatccgtggtgcaggcttcctgagccacaccgtggaatgggtagctcgcgagaagattcatggaacgaactttagcgttatcattactccgaccgaaatccagccggccaaacgcacagggccgatcttggaagacgagagcttctttggtcatgaagcgatcatgaaaaaatatatggactcgttcaaaaaggtgcagaacatgctgaatgcgatggatcttgttagcgtgcaaatctttggcgaatttgcgggtggtggcattcagaaaggcgtcgattacggcgacaaagatttctatgtgtttgacatcctgtctgatagcgggaacgagaaagtttactgggatgactatcgcgtcgaatcgttttgcaccactgtgggtctgaaagtggcgcctctgctgggacgtggtagtttcgctgaactgtcccagtacccaaacgatttcaaaagcctggtgaaccgttataatgaattggttgatacggtcggcctggagatggccaataaacacgtctttggtccgcaagcgtcttctgaaactggcctggcagaaggctacgttcttaaacccgtctatccgcgcttctttaatgtgggtacgcgcgtggcgattaaatgcaagaactccaaattttcggagaaagcctttctgattgaaccaattaaagcgaaggttgaactgacggagaacgataaacgtctgctcggaatctttagcgaatatgttacctggaaccgcgtcagtaacgtactgtcacatattggctcagtggatgccaaagattttgggcgtgtttcgggtctgacgatgaaagacatcattcgcgaagcagcacgcgaaggccatgatctgttgttcgctgataacccgtcggcggtgctgaaggagctgaccggcctcatccagaacacgattcgctccaaatggcacgaagttctggag

SEQ ID NO: 2734 - protein, 346 aa, synthetic construct
  REGION 1..346: note = variant of RNA ligase 2 from Klebsiella phage KP179
MHHHHHHGGSNMFAYYSSLENHTNAKFISKIRGAGFLSHTVEWVAREKIHGTNFSVIITPTEIQPAKRTGPILEDESFFGHEAIMKKYMDSFKKVQNMLNAMDLVSVQIFGEFAGGGIQKGVDYGDKDFYVFDILSDSGNEKVYWDDYRVESFCTTVGLKVAPLLGRGSFAELSQYPNDFKSLVNRYNELVDTVGLEMANKHVFGPQASSETGLAEGYVLKPVYPRFFNVGTRVAIKCKNSKFSEKAFLIEPIKAKVELTENDKRLLGIFSEYVTWNRVSNVLSHIGSVDAKDFGRVSGLTMKDIIREAAREGHDLLFADNPSAVLKELTGLIQNTIRSKWHEVLE

SEQ ID NO: 2735 - DNA, 1038 bp, synthetic construct
  misc_feature 1..1038: note = variant of RNA ligase 2 from Klebsiella phage KP179
  source 1..1038: mol_type = other DNA
atgcatcaccatcaccatcacggtggcagcaacatgtttgcgtattattcaagtctggaaaaccataccaatgccaagttcattagcaagatccgtggtgcaggcttcctgagccacaccgtggaatgggtagctcgcgagaagattcatggaacgaactttagcgttatcattactccgaccgaaatcgtgccggccaaacgcacagggccgatcttggaagacgagagcttctttggtcatgaaattatcatgaaaaaatatatggactccttcaaaaaggtgcagaacatgctgaatgcgatggatcttgttagcgtgcaaatctttggcgaatttgcgggtggtggcattcagaaaggcgtcgattacggcgacaaagatttctatgtgtttgacatcctgtctgatagcgggaacgagaaagtttactgggatgactatcgcgtcgaatcgttttgcaccactgtgggtctgaaactggcgcctctgctgggacgtggtagtttcgctgaactgtcccagtacccaaacgatttccgtagcctggtgaaccgttataatgaattggttgaaacggtcggcctggagatggccaataaacacgtctttggtccgcaagcgtcttctgaaactggcctggcagaaggctacgttcttaaacccgtctatccgcgcttctttaatgtgggtacgcgcgtggcgattaaatgcaagaactccaaattttcggagaaagcctttctgattgaaccaattaaagcgaaggttgaactgacggagaacgataaacgtctgctcggaatctttagcgaatatgttacctggaaccgcgtcagtaacgtactgtcacatattggctcagtgaccgccaaagattttgggcgtgtttcgggtctgacgatgaaagacatcattcgcgaagcagcacgcgaaggccatgatctgttgtctgctgataacccgagcgcggtgctgaaggagctgaccggcctcatccagaacacgattcgctccaaatggcacgaagttctggag

SEQ ID NO: 2736 - protein, 346 aa, synthetic construct
  REGION 1..346: note = variant of RNA ligase 2 from Klebsiella phage KP179
MHHHHHHGGSNMFAYYSSLENHTNAKFISKIRGAGFLSHTVEWVAREKIHGTNFSVIITPTEIVPAKRTGPILEDESFFGHEIIMKKYMDSFKKVQNMLNAMDLVSVQIFGEFAGGGIQKGVDYGDKDFYVFDILSDSGNEKVYWDDYRVESFCTTVGLKLAPLLGRGSFAELSQYPNDFRSLVNRYNELVETVGLEMANKHVFGPQASSETGLAEGYVLKPVYPRFFNVGTRVAIKCKNSKFSEKAFLIEPIKAKVELTENDKRLLGIFSEYVTWNRVSNVLSHIGSVTAKDFGRVSGLTMKDIIREAAREGHDLLSADNPSAVLKELTGLIQNTIRSKWHEVLE

SEQ ID NO: 2737 - DNA, 1038 bp, synthetic construct
  misc_feature 1..1038: note = variant of RNA ligase 2 from Klebsiella phage KP179
  source 1..1038: mol_type = other DNA
atgcatcaccatcaccatcacggtggcagcaacatgtttgcgtattattcaagtctggaaaaccataccaatgccaagttcattagcaagatccgtggtgcaggcttcctgagccacaccgtggaatgggtagctcgcgagaagattcatggaacgaactttagcgttatcattactccgaccgaaatcgtgccggccaaacgcacagggccgatcttggaagacgagagcttctttggtcatgaagcgattatgaaaaaatatatggactcgttcaaaaaggtgcagaacatgctgaatgcgatggatcttgttagcgtgcaaatctttggcgaatttgcgggtggtggcattcagaaaggcgtcgattacggcgacaaagatttctatgtgtttgacatcctgtctgatagcgggaacgagaaagtttactgggatgactatcgcgtcgaatcgttttgcaccactgtgggtctgaaagtggcgcctctgctgggacgtggtagtttcgctgaactgtcccagtacccaaacgatttcaaaagcctggtgaaccgttataatgaattggttgaaacggtcggcctggagatggccaataaacacgtctttggtccgcaagcgtcttctgaaactggcctggcagaaggctacgttcttaaacccgtctatccgcgcttctttaatgtgggtacgcgcgtggcgattaaatgcaagaactccaaattttcggagaaagcctttctgattgaaccaattaaagcgaaggttgaactgacggagaacgataaacgtctgctcggaatctttagcgaatatgttacctggaaccgcgtcagtaacgtactgtcacatattggctcagtgaccgccaaagattttgggcgtgtttcgggtctgacgatgaaagacatcattcgcgaagcagcacgcgaaggccatgatctgttgtctgctgataacccgagcgcggtgctgaaggagctgacaggcctcatccagaacacgattcgctccaaatggcacgaagttctggag

SEQ ID NO: 2738 - protein, 346 aa, synthetic construct
  REGION 1..346: note = variant of RNA ligase 2 from Klebsiella phage KP179
MHHHHHHGGSNMFAYYSSLENHTNAKFISKIRGAGFLSHTVEWVAREKIHGTNFSVIITPTEIVPAKRTGPILEDESFFGHEAIMKKYMDSFKKVQNMLNAMDLVSVQIFGEFAGGGIQKGVDYGDKDFYVFDILSDSGNEKVYWDDYRVESFCTTVGLKVAPLLGRGSFAELSQYPNDFKSLVNRYNELVETVGLEMANKHVFGPQASSETGLAEGYVLKPVYPRFFNVGTRVAIKCKNSKFSEKAFLIEPIKAKVELTENDKRLLGIFSEYVTWNRVSNVLSHIGSVTAKDFGRVSGLTMKDIIREAAREGHDLLSADNPSAVLKELTGLIQNTIRSKWHEVLE

SEQ ID NO: 2739 - DNA, 1038 bp, synthetic construct
  misc_feature 1..1038: note = variant of RNA ligase 2 from Klebsiella phage KP179
  source 1..1038: mol_type = other DNA
atgcatcaccatcaccatcacggtggcagcaacatgtttgcgtattattcaagtctggaaaaccataccaatgccaagttcattagcaagatccgtggtgcaggcttcctgagccacaccgtggaatgggtagctcgcgagaagattcatggaacgaactttagcgttatcattactccgaccgaaatcgtgccggccaaacgcacagggccgatcttggaagacgagagcttctttggtcatgaaattatcatgaaaaaatatatggactccttcaaaaaggtgcagaacatgctgaatgcgatggatcttgttagcgtgcaaatctttggcgaatttgcgggtggtggcattcagaaaggcgtcgattacggcgacaaagatttctatgtgtttgacatcctgtctgatagcgggaacgagaaagtttactgggatgactatcgcgtcgaatcgttttgcaccactgtgggtctgaaattagcgcctctgctgggacgtggtagtttcgctgaactgtcccagtacccaaacgatttcaaaagcctggtgaaccgttataatgaattggttgatacggtcggcctggagatggccaataaacacgtctttggtccgcaagcgtcttctgaaactggctgcgcagaaggctacgttcttaaacccgtctatccgcgcttctttaatgtgggtacgcgcgtggcgattaaatgcaagaactccaaattttcggagaaagcctttctgattgaaccaattaaagcgaaggttgaactgacggagaacgataaacgtctgctcggaatcttaagcgaatatgttacctggaaccgcgtcagtaacgtactgtcacatattggctcagtgaccgccaaagattttgggcgtgtttcgggtctgacgatgaaagacatcattcgcgaagcagcacgcgaaggccatgatctgttgttcgctgataacccgtcggcggtgctgaaggagctgacaggcctcatccagaacacgattcgctccaaatggcacgaagttctggag

SEQ ID NO: 2740 - protein, 346 aa, synthetic construct
  REGION 1..346: note = variant of RNA ligase 2 from Klebsiella phage KP179
MHHHHHHGGSNMFAYYSSLENHTNAKFISKIRGAGFLSHTVEWVAREKIHGTNFSVIITPTEIVPAKRTGPILEDESFFGHEIIMKKYMDSFKKVQNMLNAMDLVSVQIFGEFAGGGIQKGVDYGDKDFYVFDILSDSGNEKVYWDDYRVESFCTTVGLKLAPLLGRGSFAELSQYPNDFKSLVNRYNELVDTVGLEMANKHVFGPQASSETGCAEGYVLKPVYPRFFNVGTRVAIKCKNSKFSEKAFLIEPIKAKVELTENDKRLLGILSEYVTWNRVSNVLSHIGSVTAKDFGRVSGLTMKDIIREAAREGHDLLFADNPSAVLKELTGLIQNTIRSKWHEVLE

SEQ ID NO: 2741 - DNA, 1038 bp, synthetic construct
  misc_feature 1..1038: note = variant of RNA ligase 2 from Klebsiella phage KP179
  source 1..1038: mol_type = other DNA
atgcatcaccatcaccatcacggtggcagcaacatgtttgcgtattattcaagtctggaaaaccataccaatgccaagttcattagcaagatccgtggtgcaggcttcctgagccacaccgtggaatgggtagctcgcgagaagattcatggaacgaactttagcgttatcattactccgaccgaaatcgtgccggccaaacgcacagggccgatcttggaagacgagagcttctttggtcatgaagcgatcatgaaaaaatatatggactccttcaaaaaggtgcagaacatgctgaatgcgatggatcttgttagcgtgcaaatctttggcgaatttgcgggtggtggcattcagaaaggctttgattacggagacaaagatttctatgtgtttgacatcctgtctgatagcgggaacgagaaagtttactgggatgactatcgcgtcgaatcgttttgcaccactgtgggtctgaaattagcgcctctgctgggacgtggtagtttcgctgaactgtcccagtacccaaacgatttcaaaagcctggtgaaccgttataatgaattggttgatacggtcggcctggagatggccaataaacacgtctttggtccgcaagcgtcttctgaaaccggcctggcagaaggctacgttcttaaacccgtctatccgcgcttctttaatgtgggtacgcgcgtggcgattaaatgcaagaactccaaattttcggagaaagcctttctgattgaaccaattaaagcgaaggttgaactgacggagaacgataaacgtctgctcggaatctttagcgaatatgttacctggaaccgcgtcagtaacgtactgtcacatattggctcagtgaccgccaaagattttgggcgtgtttcgggtctgacgatgaaagacatcattcgcgaagcagcacgcgaaggccatgatctgttgttcgctgataacccgtcggcggtgctgaaggagctgacaggcctcatccagaacacgattcgctccaaatggcacgaagttctggag

SEQ ID NO: 2742 - protein, 346 aa, synthetic construct
  REGION 1..346: note = variant of RNA ligase 2 from Klebsiella phage KP179
MHHHHHHGGSNMFAYYSSLENHTNAKFISKIRGAGFLSHTVEWVAREKIHGTNFSVIITPTEIVPAKRTGPILEDESFFGHEAIMKKYMDSFKKVQNMLNAMDLVSVQIFGEFAGGGIQKGFDYGDKDFYVFDILSDSGNEKVYWDDYRVESFCTTVGLKLAPLLGRGSFAELSQYPNDFKSLVNRYNELVDTVGLEMANKHVFGPQASSETGLAEGYVLKPVYPRFFNVGTRVAIKCKNSKFSEKAFLIEPIKAKVELTENDKRLLGIFSEYVTWNRVSNVLSHIGSVTAKDFGRVSGLTMKDIIREAAREGHDLLFADNPSAVLKELTGLIQNTIRSKWHEVLE

SEQ ID NO: 2743 - DNA, 1038 bp, synthetic construct
  misc_feature 1..1038: note = variant of RNA ligase 2 from Klebsiella phage KP179
  source 1..1038: mol_type = other DNA
atgcatcaccatcaccatcacggtggcagcaacatgtttgcgtattattcaagtctggaaaaccataccaatgccaagttcattagcaagatccgtggtgcaggcttcctgagccacaccgtggaatgggtagctcgcgagaagattcatggaacgaactttagcgttatcattactccgaccgaaatcgtgccggccaaacgcacagggccgatcttggaagacgagagcttctttggtcatgaaattatcatgaaaaaatatatggactccttcaaaaaggtgcagaacatgctgaatgcgatggatcttgttagcgtgcaaatctttggcgaatttgcgggtggtggcattcagaaaggcgttgattacggagacaaagatttctatgtgtttgacatcctgtctgatagcgggaacgagaaagtgtactgggatgactatcgcgtcgaatcgttttgcaccactgtgggtctgaaattagcgcctctgctgggacgtggtagtttcgctgaactgtcccagtacccaaacgatttcaaaagcctggtgaaccgttataatgaattggttgaaacggtcggcctggagatggccaataaacacgtctttggtccgcaagcgtcttctgaagaaggcctggcagaaggctacgttcttaaacccgtctatccgcgcttctttaatgtgggtacgcgcgtggcgattaaatgcaagaactccaaattttcggagaaagcctttctgattgaaccaattaaagcgaaggttgaactgacggagaacgataaacgtctgctcggaatctttagcgaatatgttacctggaaccgcgtcagtaacgtactgtcacatattggctcagtgaccgccaaagattttggccgtgtttcgggtctgacgatgaaagacatcattcgcgaagcagcacgcgaaggccatgatctgttgttcgctgataacccgtcggcggtgctgaaggagctgacaggcctcatccagaacacgattcgctccaaatggcacgaagttctggag

SEQ ID NO: 2744 - protein, 346 aa, synthetic construct
  REGION 1..346: note = variant of RNA ligase 2 from Klebsiella phage KP179
MHHHHHHGGSNMFAYYSSLENHTNAKFISKIRGAGFLSHTVEWVAREKIHGTNFSVIITPTEIVPAKRTGPILEDESFFGHEIIMKKYMDSFKKVQNMLNAMDLVSVQIFGEFAGGGIQKGVDYGDKDFYVFDILSDSGNEKVYWDDYRVESFCTTVGLKLAPLLGRGSFAELSQYPNDFKSLVNRYNELVETVGLEMANKHVFGPQASSEEGLAEGYVLKPVYPRFFNVGTRVAIKCKNSKFSEKAFLIEPIKAKVELTENDKRLLGIFSEYVTWNRVSNVLSHIGSVTAKDFGRVSGLTMKDIIREAAREGHDLLFADNPSAVLKELTGLIQNTIRSKWHEVLE

SEQ ID NO: 2745 - DNA, 1038 bp, synthetic construct
  misc_feature 1..1038: note = variant of RNA ligase 2 from Klebsiella phage KP179
  source 1..1038: mol_type = other DNA
atgcatcaccatcaccatcacggtggcagcaacatgtttgcgtattattcaagtctggaaaaccataccaatgccaagttcgttagcaagatccgtggtgcaggcttcctgagccacaccgtggaatgggtagctcgcgagaagattcatggaacgaactttagcgttatcattactccgaccgaaatcgtgccggccaaacgcacagggccgatcttggaagacgagagcttctttggtcatgaaattatcatgaaaaaatatatggactccttcaaaaaggtgcagaacatgctgaatgcgatggatcttgttagcgtgcaaatctttggcgaatttgcgggtggtggcattcagaaaggctttgattacggagacaaagatttctatgtgtttgacatcctgtctgatagcgggaacgagaaagtgtactgggatgactatcgcgtcgaatcgttttgcaccactgtgggtctgaaattagcgcctctgctgggacgtggtagtttcgctgaactgtcccagtacccaaacgatttcaaaagcctggtgaaccgttataatgaattggttgatacggtcggcctggagatggccaataaacacgtctttggtccgcaagcgtcttctgaaactggcctggcagaaggctacgttcttaaacccgtctatccgcgcttctttaatgtgggtacgcgcgtggcgattaaatgcaagaactccaaattttcggagaaagcctttctgattgaaccaattaaagcgaaggttgaactgacggagaacgataaacgtctgctcggaatctttagcgaatatgttacctggaaccgcgtcagtaacgtactgtcacatattggctcagtgaccgccaaagattttggccgtgtttcgggtctgacgatgaaagacatcattcgcgaagcagcacgcgaaggccatgatctgttgttcgctgataacccgtcggcggtgctgaaggagctgacaggcctcatccagaacacgattcgctccaaatggcacgaagttctggag

SEQ ID NO: 2746 - protein, 346 aa, synthetic construct
  REGION 1..346: note = variant of RNA ligase 2 from Klebsiella phage KP179
MHHHHHHGGSNMFAYYSSLENHTNAKFVSKIRGAGFLSHTVEWVAREKIHGTNFSVIITPTEIVPAKRTGPILEDESFFGHEIIMKKYMDSFKKVQNMLNAMDLVSVQIFGEFAGGGIQKGFDYGDKDFYVFDILSDSGNEKVYWDDYRVESFCTTVGLKLAPLLGRGSFAELSQYPNDFKSLVNRYNELVDTVGLEMANKHVFGPQASSETGLAEGYVLKPVYPRFFNVGTRVAIKCKNSKFSEKAFLIEPIKAKVELTENDKRLLGIFSEYVTWNRVSNVLSHIGSVTAKDFGRVSGLTMKDIIREAAREGHDLLFADNPSAVLKELTGLIQNTIRSKWHEVLE

SEQ ID NO: 2747 - DNA, 1038 bp, synthetic construct
  misc_feature 1..1038: note = variant of RNA ligase 2 from Klebsiella phage KP179
  source 1..1038: mol_type = other DNA
atgcatcaccatcaccatcacggtggcagcaacatgtttgcgtattattcaagtctggaaaaccataccaatgccaagttccttagcaagatccgtggtgcaggcttcctgagccacaccgtggaatgggtagctcgcgagaagattcatggaacgaactttagcgttatcattactccgaccgaaatcgtgccggccaaacgcacagggccgatcttggaagacgagagcttctttggtcatgaaattatcatgaaaaaatatatggactccttcaaaaaggttcagaacatgctgaatgcgatggatcttgttagcgtgcaaatctttggcgaatttgcgggtggtggcattcagaaaggctttgattacggagacaaagatttctatgtgtttgacatcctgtctgatagcgggaacgagaaaagctactgggatgactatcgcgtcgaatcgttttgcaccactgttggtctgaaattagcgcctctgctgggacgtggtagtttcgctgaactgtcccagtacccaaacgatttcaaaagcctggtgaaccgttataatgaattggttgatacggtcggcctggagatggccaataaacacgtctttggtccgcaagcgtcttctgaagaaggcctggcagaaggctacgttcttaaacccgtctatccgcgcttctttaatgtgggtacgcgcgtggcgattaaatgcaagaactccaaattttcggagaaagcctttctgattgaaccaattaaagcgaaggttgaactgacggagaacgataaacgtctgctcggaatctttagcgaatatgttacctggaaccgcgtcagtaacgtactgtcacatattggctcagtgacccagaaagattttggccgtgttgtgggtctgacgatgaaagacatcattcgcgaagcagcacgcgaaggccatgaactgttgttcgctgataacccgtcggcggtgctgaaggagctgacaggcctcatccagaacaccattcgctccaaatggcacgaagttctggag

SEQ ID NO: 2748 - protein, 346 aa, synthetic construct
  REGION 1..346: note = variant of RNA ligase 2 from Klebsiella phage KP179
MHHHHHHGGSNMFAYYSSLENHTNAKFLSKIRGAGFLSHTVEWVAREKIHGTNFSVIITPTEIVPAKRTGPILEDESFFGHEIIMKKYMDSFKKVQNMLNAMDLVSVQIFGEFAGGGIQKGFDYGDKDFYVFDILSDSGNEKSYWDDYRVESFCTTVGLKLAPLLGRGSFAELSQYPNDFKSLVNRYNELVDTVGLEMANKHVFGPQASSEEGLAEGYVLKPVYPRFFNVGTRVAIKCKNSKFSEKAFLIEPIKAKVELTENDKRLLGIFSEYVTWNRVSNVLSHIGSVTQKDFGRVVGLTMKDIIREAAREGHELLFADNPSAVLKELTGLIQNTIRSKWHEVLE

SEQ ID NO: 2749 - DNA, 1038 bp, synthetic construct
  misc_feature 1..1038: note = variant of RNA ligase 2 from Klebsiella phage KP179
  source 1..1038: mol_type = other DNA
atgcatcaccatcaccatcacggtggcagcaacatgtttgcgtattattcaagtctggaaaaccataccaatgccaagttccttagcaagatccgtggtgcaggcttcctgagccacaccgtggaatgggtagctcgcgagaagattcatggaacgaactttagcgttatcattactccgaccgaaatcgtgccggccaaacgcacagggccgatcttggaagacgagagcttctttggtcatgaaattatcatgaaaaaatatatggactccttcaaaaagattcagaacatgctgaatgcgatggatcttgttagcgtgcaaatctttggcgaatttgcgggtggtggcattcagaaaggctttgattacggagacaaagatttctatgtgtttgacatcctgtctgatagcgggaacgagaaaagctactgggatgactatcgcgtcgaatcgttttgcaccactgttggtctgaaattagcgcctctgctgggacgtggtagtttcgctgaactgtcccagtacccaaacgatttcaaaagcctggtgaaccgttataatgaattggttgatacggtcggcctggagatggccaataaacacgtctttggtccgcaagcgtcttctgaagaaggcctggcagaaggctacgttcttaaacccgtctatccgcgcttctttaatgtgggtacgcgcgtggcgattaaatgcaagaactccaaattttcggagaaagcctttctgattgaaccaattaaagcgaaggttgaactgacggagaacgataaacgtctgctcggaatctttagcgaatatgttacctggaaccgcgtcagtaacgtactgtcacatattggctcagtgacctcgaaagattttggccgtgttgtgggtctgacgatgaaagacatcattcgcgaagcagcacgcgaaggccatgaactgttgttcgctgataacccgtcggcggtgctgaaggagctgacaggcctcatccagaacacgattcgctccaaatggcacgaagttctggag

SEQ ID NO: 2750 - protein, 346 aa, synthetic construct
  REGION 1..346: note = variant of RNA ligase 2 from Klebsiella phage KP179
MHHHHHHGGSNMFAYYSSLENHTNAKFLSKIRGAGFLSHTVEWVAREKIHGTNFSVIITPTEIVPAKRTGPILEDESFFGHEIIMKKYMDSFKKIQNMLNAMDLVSVQIFGEFAGGGIQKGFDYGDKDFYVFDILSDSGNEKSYWDDYRVESFCTTVGLKLAPLLGRGSFAELSQYPNDFKSLVNRYNELVDTVGLEMANKHVFGPQASSEEGLAEGYVLKPVYPRFFNVGTRVAIKCKNSKFSEKAFLIEPIKAKVELTENDKRLLGIFSEYVTWNRVSNVLSHIGSVTSKDFGRVVGLTMKDIIREAAREGHELLFADNPSAVLKELTGLIQNTIRSKWHEVLE

SEQ ID NO: 2751 - DNA, 1038 bp, synthetic construct
  misc_feature 1..1038: note = variant of RNA ligase 2 from Klebsiella phage KP179
  source 1..1038: mol_type = other DNA
atgcatcaccatcaccatcacggtggcagcaacatgtttgcgtattattcaagtctggaaaaccataccaatgccaagttcattagcaagatccgtggtgcaggcttcctgagccacaccgtggaatgggtagctcgcgagaagattcatggaacgaactttagcgttatcattactccgaccgaaatcgtgccggccaaacgcacagggccgatcttggaagacgagagcttctttggtcatgaaattatcatgaaaaaatatatggactccttcaaaaaggtgcagaacatgctgaatgcgatggatcttgttagcgtgcaaatctttggcgaatttgcgggtggtggcattcagaaaggctttgattacggagacaaagatttctatgtgtttgacatcctgtctgatagcgggaacgagaaaacctactgggatgactatcgcgtcgaatcgttttgcaccactgttggtctgaaattagcgcctctgctgggacgtggtagtttcgctgaactgtcccagtacccaaacgatttcaaaagcctggtgaaccgttataatgaattggttgatacggtcggcctagagatggccaataaacacgtctttggtccgcaagcgtcttctgaagaaggcctggcagaaggctacgttcttaaacccgtctatccgcgcttctttaatgtgggtacgcgcgtggcgattaaatgcaagaactccaaattttcggagaaagcctttctgattgaaccaattaaagcgaaggttgaactgacggagaacgataaacgtctgctcggaatctttagcgaatatgttacctggaaccgcgtcagtaacgtactgtcacatattggctcagtgaccgcgaaagattttggccgtgttgtgggtctgacgatgaaagacatcattcgcgaagcagcacgcgaaggccatgaactgttgttcgctgataacccgtcggcggtgctgaaggagctgacaggcctcatccagaacaccattcgctccaaatggcacgaagttctggag

SEQ ID NO: 2752 - protein, 346 aa, synthetic construct
  REGION 1..346: note = variant of RNA ligase 2 from Klebsiella phage KP179
MHHHHHHGGSNMFAYYSSLENHTNAKFISKIRGAGFLSHTVEWVAREKIHGTNFSVIITPTEIVPAKRTGPILEDESFFGHEIIMKKYMDSFKKVQNMLNAMDLVSVQIFGEFAGGGIQKGFDYGDKDFYVFDILSDSGNEKTYWDDYRVESFCTTVGLKLAPLLGRGSFAELSQYPNDFKSLVNRYNELVDTVGLEMANKHVFGPQASSEEGLAEGYVLKPVYPRFFNVGTRVAIKCKNSKFSEKAFLIEPIKAKVELTENDKRLLGIFSEYVTWNRVSNVLSHIGSVTAKDFGRVVGLTMKDIIREAAREGHELLFADNPSAVLKELTGLIQNTIRSKWHEVLE

SEQ ID NO: 2753 - DNA, 1038 bp, synthetic construct
  misc_feature 1..1038: note = variant of RNA ligase 2 from Klebsiella phage KP179
  source 1..1038: mol_type = other DNA
atgcatcaccatcaccatcacggtggcagcaacatgtttgcgtattattcaagtctggaaaaccataccaatgccaagttcattagcaagatccgtggtgcaggcttcctgagccacaccgtggaatgggtagctcgcgagaagattcatggaacgaactttagcgttatcattactccgaccgaaatcgtgccggccaaacgcacagggccgatcttggaagacgagagcttctttggtcatgaaattatcatgaaaaaatatatggactccttcaaaaaggttcagaacatgctgaatgcgatggatcttgttagcgtgcaaatctttggcgaatttgcgggtggtggcattcagaaaggctttgattacggagacaaagatttctatgtgtttgacatcctgtctgatagcgggaacgagaaaagctactgggatgactatcgcgtcgaatcgttttgcaccactgttggtctgaaattagcgcctctgctgggacgtggtagtttcgctgaactgtcccagtacccaaacgatttcaaaagcctggtgaaccgttataatgaattggttgatacggtcggcctggagatggccaataaacacgtctttggtccgcaagcgtcttctgaagaaggcctggcagaaggctacgttcttaaacccgtctatccgcgcttctttaatgtgggtacgcgcgtggcgattaaatgcaagaactccaaattttcggagaaagcctttctgattgaaccaattaaagcgaaggttgaactgacggagaacgataaacgtctgctcggaatctttagcgaatatgttacctggaaccgcgtcagtaacgtactgtcacatattggctcagtgacccagaaagattttggccgtgttgtgggtctgacgatgaaagacatcattcgcgaagcagcacgcgaaggccatgatctgttgttcgctgataacccgtcggcggtgctgaaggagctgacaggcctcatccagaacacgattcgctccaaatggcacgaagttctggag

SEQ ID NO: 2754 - protein, 346 aa, synthetic construct
  REGION 1..346: note = variant of RNA ligase 2 from Klebsiella phage KP179
MHHHHHHGGSNMFAYYSSLENHTNAKFISKIRGAGFLSHTVEWVAREKIHGTNFSVIITPTEIVPAKRTGPILEDESFFGHEIIMKKYMDSFKKVQNMLNAMDLVSVQIFGEFAGGGIQKGFDYGDKDFYVFDILSDSGNEKSYWDDYRVESFCTTVGLKLAPLLGRGSFAELSQYPNDFKSLVNRYNELVDTVGLEMANKHVFGPQASSEEGLAEGYVLKPVYPRFFNVGTRVAIKCKNSKFSEKAFLIEPIKAKVELTENDKRLLGIFSEYVTWNRVSNVLSHIGSVTQKDFGRVVGLTMKDIIREAAREGHDLLFADNPSAVLKELTGLIQNTIRSKWHEVLE

SEQ ID NO: 2755 - DNA, 1038 bp, synthetic construct
  misc_feature 1..1038: note = variant of RNA ligase 2 from Klebsiella phage KP179
  source 1..1038: mol_type = other DNA
atgcatcaccatcaccatcacggtggcagcaacatgtttgcgtattattcaagtctggaaaaccataccaatgccaagttccttagcaagatccgtggtgcaggcttcctgagccacaccgtggaatgggtagctcgcgagaagattcatggaacgaactttagcgttatcattactccgaccgaaatcgtgccggccaaacgcacagggccgatcttggaagacgagagcttctttggtcatgaaattatcatgaaaaaatatatggactccttcaaaaaggttcagaacatgctgaatgcgatggatcttgttagcgtgcaaatctttggcgaatttgcgggtggtggcattcagaaaggctttgattacggagacaaagatttctatgtgtttgacatcctgtctgatagcgggaacgagaaagtgtactgggatgactatcgcgtcgaatcgttttgcaccactgttggtctgaaattagcgcctctgctgggacgtggtagtttcgctgaactgtcccagtacccaaacgatttcaaaagcctggtgaaccgttataatgaattggttgatacggtcggcctggagatggccaataaacacgtctttggtccgcaagcgtcttctgaagaaggcctggcagaaggctacgttcttaaacccgtctatccgcgcttctttaatgtgggtacgcgcgtggcgattaaatgcaagaactccaaattttcggagaaagcctttctgattgaaccaattaaagcgaaggttgaactgacggagaacgataaacgtctgctcggaatctttagcgaatatgttacctggaaccgcgtcagtaacgtactgtcacatattggctcagtgaccgcgaaagattttggccgtgttgtgggtctgacgatgaaagacatcattcgcgaagcagcacgcgaaggccatgatctgttgttcgctgataacccgtcggcggtgctgaaggagctgacaggcctcatccagaacaccattcgctccaaatggcacgaagttctggag

SEQ ID NO: 2756 - protein, 346 aa, synthetic construct
  REGION 1..346: note = variant of RNA ligase 2 from Klebsiella phage KP179
MHHHHHHGGSNMFAYYSSLENHTNAKFLSKIRGAGFLSHTVEWVAREKIHGTNFSVIITPTEIVPAKRTGPILEDESFFGHEIIMKKYMDSFKKVQNMLNAMDLVSVQIFGEFAGGGIQKGFDYGDKDFYVFDILSDSGNEKVYWDDYRVESFCTTVGLKLAPLLGRGSFAELSQYPNDFKSLVNRYNELVDTVGLEMANKHVFGPQASSEEGLAEGYVLKPVYPRFFNVGTRVAIKCKNSKFSEKAFLIEPIKAKVELTENDKRLLGIFSEYVTWNRVSNVLSHIGSVTAKDFGRVVGLTMKDIIREAAREGHDLLFADNPSAVLKELTGLIQNTIRSKWHEVLE

SEQ ID NO: 2757 - DNA, 1038 bp, synthetic construct
  misc_feature 1..1038: note = variant of RNA ligase 2 from Klebsiella phage KP179
  source 1..1038: mol_type = other DNA
atgcatcaccatcaccatcacggtggcagcaacatgtttgcgtattattcaagtctggaaaaccataccaatgccaagttccttagcaagatccgtggtgcaggcttcctgagccacaccgtggaatgggtagctcgcgagaagattcatggaacgaactttagcgttatcattactccgaccgaaatcgtgccggccaaacgcacagggccgatcttggaagacgagagcttctttggtcatgaaattatcatgaaaaaatatatggactccttcaaaaaggtgcagaacatgctgaatgcgatggatcttgttagcgtgcaaatctttggcgaatttgcgggtggtggcattcagaaaggctttgattacggagacaaagatttctatgtgtttgacatcctgtctgatagcgggaacgagaaaagctactgggatgactatcgcgtcgaatcgttttgcaccactgttggtctgaaattagcgcctctgctgggacgtggtagtttcgctgaactgtcccagtacccaaacgatttcaaaagcctggtgaaccgttataatgaattggttgatacggtcggcctggagatggccaataaacacgtctttggtccgcaagcgtcttctgaagaaggcctggcagaaggctacgttcttaaacccgtctatccgcgcttctttaatgtgggtacgcgcgtggcgattaaatgcaagaactccaaattttcggagaaagcctttctgattgaaccaattaaagcgaaggttgaactgacggagaacgataaacgtctgctcggaatctttagcgaatatgttacctggaaccgcgtcagtaacgtactgtcacatattggctcagtgacctcgaaagattttggccgtgttgtgggtctgacgatgaaagacatcattcgcgaagcagcacgcgaaggccatgatctgttgttcgctgataacccgtcggcggtgctgaaggagctgacaggcctcatccagaacacgattcgctccaaatggcacgaagttctggag

SEQ ID NO: 2758 - protein, 346 aa, synthetic construct
  REGION 1..346: note = variant of RNA ligase 2 from Klebsiella phage KP179
MHHHHHHGGSNMFAYYSSLENHTNAKFLSKIRGAGFLSHTVEWVAREKIHGTNFSVIITPTEIVPAKRTGPILEDESFFGHEIIMKKYMDSFKKVQNMLNAMDLVSVQIFGEFAGGGIQKGFDYGDKDFYVFDILSDSGNEKSYWDDYRVESFCTTVGLKLAPLLGRGSFAELSQYPNDFKSLVNRYNELVDTVGLEMANKHVFGPQASSEEGLAEGYVLKPVYPRFFNVGTRVAIKCKNSKFSEKAFLIEPIKAKVELTENDKRLLGIFSEYVTWNRVSNVLSHIGSVTSKDFGRVVGLTMKDIIREAAREGHDLLFADNPSAVLKELTGLIQNTIRSKWHEVLE

SEQ ID NO: 2759 - DNA, 1038 bp, synthetic construct
  misc_feature 1..1038: note = variant of RNA ligase 2 from Klebsiella phage KP179
  source 1..1038: mol_type = other DNA
atgcatcaccatcaccatcacggtggcagcaacatgtttgcgtattattcaagtctggaaaaccataccaatgccaagttcattagcaagatccgtggtgcaggcttcctgagccacaccgtggaatgggtagctcgcgagaagattcatggaacgaactttagcgttatcattactccgaccgaaatcgtgccggccaaacgcacagggccgatcttggaagacgagagcttctttggtcatgaaattatcatgaaaaaatatatggactccttcaaaaaggtgcagaacatgctgaatgcgatggatcttgttagcgtgcaaatctttggcgaatttgcgggtggtggcattcagaaaggctttgattacggagacaaagatttctatgtgtttgacatcctgtctgatagcgggaacgagaaagtgtactgggatgactatcgcgtcgaatcgttttgcaccactgttggtctgaaattagcgcctctgctgggacgtggtagtttcgctgaactgtcccagtacccaaacgatttcaaaagcctggtggtgcgttataatgaattggttgatacggtcggcctggagatggccaataaacacgtctttggtccgcaagcgtcttctgaagaaggcctggcagaaggctacgttcttaaacccgtctatccgcgcttctttaatgtgggtacgcgcgtggcgattaaatgcaagaactccaaattttcggagaaagcctttctgattgaaccaattaaagcgaaggttgaactgacggagaacgataaacgtctgctcggaatctttagcgaatatgttacctggaaccgcgtcagtaacgtactgtcacatattggctcagtgacccagaaagattttggccgtgttgtgggtctgacgatgaaagacatcattcgcgaagcagcacgcgaaggccatgatctgttgttcgctgataacccgtcggcggtgctgaaggagctgacaggcctcatccagaacaccattcgctccaaatggcacgaagttctggag

SEQ ID NO: 2760 - protein, 346 aa, synthetic construct
  REGION 1..346: note = variant of RNA ligase 2 from Klebsiella phage KP179
MHHHHHHGGSNMFAYYSSLENHTNAKFISKIRGAGFLSHTVEWVAREKIHGTNFSVIITPTEIVPAKRTGPILEDESFFGHEIIMKKYMDSFKKVQNMLNAMDLVSVQIFGEFAGGGIQKGFDYGDKDFYVFDILSDSGNEKVYWDDYRVESFCTTVGLKLAPLLGRGSFAELSQYPNDFKSLVVRYNELVDTVGLEMANKHVFGPQASSEEGLAEGYVLKPVYPRFFNVGTRVAIKCKNSKFSEKAFLIEPIKAKVELTENDKRLLGIFSEYVTWNRVSNVLSHIGSVTQKDFGRVVGLTMKDIIREAAREGHDLLFADNPSAVLKELTGLIQNTIRSKWHEVLE

SEQ ID NO: 2761 - DNA, 1038 bp, synthetic construct
  misc_feature 1..1038: note = variant of RNA ligase 2 from Klebsiella phage KP179
  source 1..1038: mol_type = other DNA
atgcatcaccatcaccatcacggtggcagcaacatgtttgcgtattattcaagtctggaaaaccataccaatgccaagttccttagcaagatccgtggtgcaggcttcctgagccacaccgtggaatgggtagctcgcgagaagattcatggaacgaactttagcgttatcattactccgaccgaaatcgtgccggccaaacgcacagggccgatcttggaagacgagagcttctttggtcatgaaattatcatgaaaaaatatatggactccttcaaaaaggttcagaacatgctgaatgcgatggatcttgttagcgtgcaaatctttggcgaatttgcgggtggtggcattcagaaaggctttgattacggagacaaagatttctatgtgtttgacatcctgtctgatagcgggaacgagaaagtgtactgggatgactatcgcgtcgaatcgttttgcaccactgttggtctgaaattagcgcctctgctgggacgtggtagtttcgctgaactgtcccagtacccaaacgatttcaaaagcctggtggtgcgttataatgaattggttgatacggtcggcctggagatggccaataaacacgtctttggtccgcaagcgtcttctgaagaaggcctggcagaaggctacgttcttaaacccgtctatccgcgcttctttaatgtgggtacgcgcgtggcgattaaatgcaagaactccaaattttcggagaaagcctttctgattgaaccaattaaagcgaaggttgaactgacggagaacgataaacgtctgctcggaatctttagcgaatatgttacctggaaccgcgtcagtaacgtactgtcacatattggctcagtgacccagaaagattttgtccgtgttgtgggtctgacgatgaaagacatcattcgcgaagcagcacgcgaaggccatgatctgttgttcgctgataacccgtcggcggtgctgaaggagctgacaggcctcatccagaacatcattcgctccaaatggcacgaagttctggag

SEQ ID NO: 2762 - protein, 346 aa, synthetic construct
  REGION 1..346: note = variant of RNA ligase 2 from Klebsiella phage KP179
MHHHHHHGGSNMFAYYSSLENHTNAKFLSKIRGAGFLSHTVEWVAREKIHGTNFSVIITPTEIVPAKRTGPILEDESFFGHEIIMKKYMDSFKKVQNMLNAMDLVSVQIFGEFAGGGIQKGFDYGDKDFYVFDILSDSGNEKVYWDDYRVESFCTTVGLKLAPLLGRGSFAELSQYPNDFKSLVVRYNELVDTVGLEMANKHVFGPQASSEEGLAEGYVLKPVYPRFFNVGTRVAIKCKNSKFSEKAFLIEPIKAKVELTENDKRLLGIFSEYVTWNRVSNVLSHIGSVTQKDFVRVVGLTMKDIIREAAREGHDLLFADNPSAVLKELTGLIQNIIRSKWHEVLE

SEQ ID NO: 2763 - DNA, 1038 bp, synthetic construct
  misc_feature 1..1038: note = variant of RNA ligase 2 from Klebsiella phage KP179
  source 1..1038: mol_type = other DNA
atgcatcaccatcaccatcacggtggcagcaacatgtttgcgtattattcaagtctggaaaaccataccaatgccaagttccttagcaagatccgtggtgcaggcttcctgagccacaccgtggaatgggtagctcgcgagaagattcatggaacgaactttagcgttatcattactccgaccgaaatcgtgccggccaaacgcacagggccgatcttggaagacgagagcttctttggtcatgaaattatcatgaaaaaatatatggactccttcaaaaaggttcagaacatgctgaatgcgatggatcttgttagcgtgcaaatctttggcgaatttgcgggtggtggcattcagaaaggctttgattacggagacaaagatttctatgtgtttgacatcctgtctgatagcgggaacgagaaaagctactgggatgactatcgcgtcgaatcgttttgcaccactgttggtctgaaattagcgcctctgctgggacgtggtagtttcgctgaactgtcccagtacccaaacgatttcaaaagcctggtgaaccgttataatgaattggttgatacggtcggcctggagatggccaataaacacgtctttggtccgcaagcgtcttctgaagaaggcctggcagaaggctacgttcttaaacccgtctatccgcgcttctttaatgtgggtacgcgcgtggcgattaaatgcaagaactccaaattttcggagaaagcctttctgattgaaccaattaaagcgaaggttgaactgacggagaacgataaacgtctgctcggaatctttagcgaatatgttacctggaaccgcgtcagtaacgtactgtcacatattggctcagtgaccgccaaagattttgtccgtgttgtgggtctgacgatgaaagacatcattcgcgaagcagcacgcgaaggccatgatctgttgttcgctgataacccgtcggcggtgctgaaggagctgacaggcctcatccagaacaccattcgctccaaatggcacgaagttctggag

SEQ ID NO: 2764 - protein, 346 aa, synthetic construct
  REGION 1..346: note = variant of RNA ligase 2 from Klebsiella phage KP179
MHHHHHHGGSNMFAYYSSLENHTNAKFLSKIRGAGFLSHTVEWVAREKIHGTNFSVIITPTEIVPAKRTGPILEDESFFGHEIIMKKYMDSFKKVQNMLNAMDLVSVQIFGEFAGGGIQKGFDYGDKDFYVFDILSDSGNEKSYWDDYRVESFCTTVGLKLAPLLGRGSFAELSQYPNDFKSLVNRYNELVDTVGLEMANKHVFGPQASSEEGLAEGYVLKPVYPRFFNVGTRVAIKCKNSKFSEKAFLIEPIKAKVELTENDKRLLGIFSEYVTWNRVSNVLSHIGSVTAKDFVRVVGLTMKDIIREAAREGHDLLFADNPSAVLKELTGLIQNTIRSKWHEVLE

SEQ ID NO: 2765 - DNA, 1038 bp, synthetic construct
  misc_feature 1..1038: note = variant of RNA ligase 2 from Klebsiella phage KP179
  source 1..1038: mol_type = other DNA
atgcatcaccatcaccatcacggtggcagcaacatgtttgcgtattattcaagtctggaaaaccataccaatgccaagttcattagcaagatccgtggtgcaggcttcctgagccacaccgtggaatgggtagcgcgcgagaagattcatggaacgaactttagcgttatcattactccgaccgaaatcgtgccggccaaacgcacagggccgatcttggaagacgagagcttctttggtcatgaaattatcatgaaaaaatatatggactccttcaaaaaggtgcagaacatgctgaatgcgatggatcttgttagcgtgcaaatctttggcgaatttgcgggtggtggcattcagaaaggctttgattacggagacaaagatttctatgtgtttgacatcctgtctgatagcgggaacgagaaaagctactgggatgactatcgcgtcgaatcgttttgcaccactgttggtctgaaattagcgcctctgctgggacgtggtagtttcgctgaactgtcccagtacccaaacgatttcaaaagcctggtgaaccgttataatgaattggttgatacggtcggcctggagatggccaataaacacgtctttggtccgcaagcgtcttctgaagaaggcctggcagaaggctacgttcttaaacccgtctatccgcgcttctttaatgtgggtacgcgcgtggcgattaaatgcaagaactccaaattttcggagaaagcctttctgattgaaccaattaaagcgaaggttgaactgacggagaacgataaacgtctgctcggaatctttagcgaatatgttacctggaaccgcgtcaacaacgtactgtcacatattggctcagtgaccgccaaagattttggccgtgtttcgggtctgacgatgaaagacatcattcgcgaagcagcacgcgaaggccatgatctgttgttcgctgataacccgtcggcggtgctgaaggagctgacaggcctcatccagaacacgattcgctccaaatggcacgaagttctggag

SEQ ID NO: 2766 - protein, 346 aa, synthetic construct
  REGION 1..346: note = variant of RNA ligase 2 from Klebsiella phage KP179
MHHHHHHGGSNMFAYYSSLENHTNAKFISKIRGAGFLSHTVEWVAREKIHGTNFSVIITPTEIVPAKRTGPILEDESFFGHEIIMKKYMDSFKKVQNMLNAMDLVSVQIFGEFAGGGIQKGFDYGDKDFYVFDILSDSGNEKSYWDDYRVESFCTTVGLKLAPLLGRGSFAELSQYPNDFKSLVNRYNELVDTVGLEMANKHVFGPQASSEEGLAEGYVLKPVYPRFFNVGTRVAIKCKNSKFSEKAFLIEPIKAKVELTENDKRLLGIFSEYVTWNRVNNVLSHIGSVTAKDFGRVSGLTMKDIIREAAREGHDLLFADNPSAVLKELTGLIQNTIRSKWHEVLE

SEQ ID NO: 2767 - DNA, 1038 bp, synthetic construct
  misc_feature 1..1038: note = variant of RNA ligase 2 from Klebsiella phage KP179
  source 1..1038: mol_type = other DNA
atgcatcaccatcaccatcacggtggcagcaacatgtttgcgtattattcaagtctggaaaaccataccaatgccaagttcattagcaagatccgtggtgcaggcttcctgagccacaccgtggaatgggtagctcgcgagaagattcatggaacgaactttagcgttatcattactccgaccgaaatcgtgccggccaaacgcacagggccgatcttggaagacgagagcttctttggtcatgaaattatcatgaaaaaatatatggactccttcaaaaaggtgcagaacatgctgaatgcgatggatcttgttagcgtgcaaatctttggcgaatttgcgggtggtggcattcagaaaggctttgattacggagacaaagatttctatgtgtttgacatcctgtctgatagcgggaacgagaaagtgtactgggatgactatcgcgtcgaatcgttttgcaccactgttggtctgaaattagcgcctctgctgggacgtggtagtttcgctgaactgtcccagtacccaaacgatttcaaaagcctggtgaaccgttataatgaattggttgatacggtcggcctggagatggccaataaacacgtctttggtccgcaagcgtcttctgaagaaggcctggcagaaggctacgttcttaaacccgtctatccgcgcttctttaatgtgggtacgcgcgtggcgattaaatgcaagaactccaaattttcggagaaagcctttctgattgaaccaattaaagcgaaggttgaactgacggagaacgataaacgtctgctcggaatctttagcgaatatgttacctggaaccgcgtcagtaacgtactgtcacatattggctcagtgaccgcgaaagattttgtccgtgttgtgggtctgacgatgaaagacatcattcgcgaagcagcacgcgaaggccatgatctgttgttcgctgataacccgtcggcggtgctgaaggagctgacaggcctcatccagaacatcattcgctccaaatggcacgaagttctggag

SEQ ID NO: 2768 - protein, 346 aa, synthetic construct
  REGION 1..346: note = variant of RNA ligase 2 from Klebsiella phage KP179
MHHHHHHGGSNMFAYYSSLENHTNAKFISKIRGAGFLSHTVEWVAREKIHGTNFSVIITPTEIVPAKRTGPILEDESFFGHEIIMKKYMDSFKKVQNMLNAMDLVSVQIFGEFAGGGIQKGFDYGDKDFYVFDILSDSGNEKVYWDDYRVESFCTTVGLKLAPLLGRGSFAELSQYPNDFKSLVNRYNELVDTVGLEMANKHVFGPQASSEEGLAEGYVLKPVYPRFFNVGTRVAIKCKNSKFSEKAFLIEPIKAKVELTENDKRLLGIFSEYVTWNRVSNVLSHIGSVTAKDFVRVVGLTMKDIIREAAREGHDLLFADNPSAVLKELTGLIQNIIRSKWHEVLE

SEQ ID NO: 2769 - DNA, 1038 bp, synthetic construct
  misc_feature 1..1038: note = variant of RNA ligase 2 from Klebsiella phage KP179
  source 1..1038: mol_type = other DNA
atgcatcaccatcaccatcacggtggcagcaacatgtttgcgtattattcaagtctggaaaaccataccaatgccaagttcattagcaagatccgtggtgcaggcttcctgagccacaccgtggaatgggtagctcgcgagaagattcatggaacgaactttagcgttatcattactccgaccgaaatcgtgccggccaaacgcacagggccgatcttggaagacgagagcttctttggtcatgaaattatcatgaaaaaatatatggactccttcaaaaaggttcagaacatgctgaatgcgatggatcttgttagcgtgcaaatctttggcgaatttgcgggtggtggcattcagaaaggctttgattacggagacaaagatttctatgtgtttgacatcctgtctgatagcgggaacgagaaagtgtactgggatgactatcgcgtcgaatcgttttgcaccactgttggtctgaaattagcgcctctgctgggacgtggtagtttcgctgaactgtcccagtacccaaacgatttcaaaagcctggtgaaccgttataatgaattggttgatacggtcggcctggagatggccaataaacacgtctttggtccgcaagcgtcttctgaagaaggcctggcagaaggctacgttcttaaacccgtctatccgcgcttctttaatgtgggtacgcgcgtggcgattaaatgcaagaactccaaattttcggagaaagcctttctgattgaaccaattaaagcgaaggttgaactgacggagaacgataaacgtctgctcggaatctttagcgaatatgttacctggaaccgcgtcagtaacgtactgtcacatattggctcagtgacctcgaaagattttggccgtgttgtgggtctgacgatgaaagacatcattcgcgaagcagcacgcgaaggccatgatctgttgttcgctgataacccgtcggcggtgctgaaggagctgacaggcctcatccagaacacgattcgctccaaatggcacgaagttctggag

SEQ ID NO: 2770 - protein, 346 aa, synthetic construct
  REGION 1..346: note = variant of RNA ligase 2 from Klebsiella phage KP179
MHHHHHHGGSNMFAYYSSLENHTNAKFISKIRGAGFLSHTVEWVAREKIHGTNFSVIITPTEIVPAKRTGPILEDESFFGHEIIMKKYMDSFKKVQNMLNAMDLVSVQIFGEFAGGGIQKGFDYGDKDFYVFDILSDSGNEKVYWDDYRVESFCTTVGLKLAPLLGRGSFAELSQYPNDFKSLVNRYNELVDTVGLEMANKHVFGPQASSEEGLAEGYVLKPVYPRFFNVGTRVAIKCKNSKFSEKAFLIEPIKAKVELTENDKRLLGIFSEYVTWNRVSNVLSHIGSVTSKDFGRVVGLTMKDIIREAAREGHDLLFADNPSAVLKELTGLIQNTIRSKWHEVLE

SEQ ID NO: 2771 - DNA, 1038 bp, synthetic construct
  misc_feature 1..1038: note = variant of RNA ligase 2 from Klebsiella phage KP179
  source 1..1038: mol_type = other DNA
atgcatcaccatcaccatcacggtggcagcaacatgtttgcgtattattcaagtctggaaaaccataccaatgccaagttcattagcaagatccgtggtgcaggcttcctgagccacaccgtggaatgggtagctcgcgagaagattcatggaacgaactttagcgttatcattactccgaccgaaatcgtgccggccaaacgcacagggccgatcttggaagacgagagcttctttggtcatgaaattatcatgaaaaaatatatggactccttcaaaaaggtgcagaacatgctgaatgcgatggatcttgttagcgtgcaaatctttggcgaatttgcgggtggtggcattcagaaaggctttgattacggagacaaagatttctatgtgtttgacatcctgtctgatagcgggaacgagaaaagctactgggatgactatcgcgtcgaatcgttttgcaccactgttggtctgaaattagcgcctctgctgggacgtggtagtttcgctgaactgtcccagtacccaaacgatttcaaaagcctggtgaaccgttataatgaattggttgatacggtcggcctggagatggccaataaacacgtctttggtccgcaagcgtcttctgaagaaggcctggcagaaggctacgttcttaaacccgtctatccgcgcttctttaatgtgggtacgcgcgtggcgattaaatgcaagaactccaaattttcggagaaagcctttctgattgaaccaattaaagcgaaggttgaactgacggagaacgataaacgtctgctcggaatctttagcgaatatgttacctggaaccgcgtcagtaacgtactgtcacatattggctcagtgacccagaaagattttggccgtgttgtgggtctgacgatgaaagacatcattcgcgaagcagcacgcgaaggccatgaactgttgttcgctgataacccgtcggcggtgctgaaggagctgacaggcctcatccagaacatcattcgctccaaatggcacgaagttctggag

SEQ ID NO: 2772 - protein, 346 aa, synthetic construct
  REGION 1..346: note = variant of RNA ligase 2 from Klebsiella phage KP179
MHHHHHHGGSNMFAYYSSLENHTNAKFISKIRGAGFLSHTVEWVAREKIHGTNFSVIITPTEIVPAKRTGPILEDESFFGHEIIMKKYMDSFKKVQNMLNAMDLVSVQIFGEFAGGGIQKGFDYGDKDFYVFDILSDSGNEKSYWDDYRVESFCTTVGLKLAPLLGRGSFAELSQYPNDFKSLVNRYNELVDTVGLEMANKHVFGPQASSEEGLAEGYVLKPVYPRFFNVGTRVAIKCKNSKFSEKAFLIEPIKAKVELTENDKRLLGIFSEYVTWNRVSNVLSHIGSVTQKDFGRVVGLTMKDIIREAAREGHELLFADNPSAVLKELTGLIQNIIRSKWHEVLE

SEQ ID NO: 2773 - DNA, 1038 bp, synthetic construct
  misc_feature 1..1038: note = variant of RNA ligase 2 from Klebsiella phage KP179
  source 1..1038: mol_type = other DNA
atgcatcaccatcaccatcacggtggcagcaacatgtttgcgtattattcaagtctggaaaaccataccaatgccaagttcattagcaagatccgtggtgcaggcttcctgagccacaccgtggaatgggtagctcgcgagaagattcatggaacgaactttagcgttatcattactccgaccgaaatcgtgccggccaaacgcacagggccgatcttggaagacgagagcttctttggtcatgaaattatcatgaaaaaatatatggactccttcaaaaaggttcagaacatgctgaatgcgatggatcttgttagcgtgcaaatctttggcgaatttgcgggtggtggcattcagaaaggctttgattacggagacaaagatttctatgtgtttgacatcctgtctgatagcgggaacgagaaagtgtactgggatgactatcgcgtcgaatcgttttgcaccactgttggtctgaaattagcgcctctgctgggacgtggtagtttcgctgaactgtcccagtacccaaacgatttcaaaagcctggtgaaccgttataatgaattggttgatacggtcggcctggagatggccaataaacacgtctttggtccgcaagcgtcttctgaagaaggcctggcagaaggctacgttcttaaacccgtctatccgcgcttctttaatgtgggtacgcgcgtggcgattaaatgcaagaactccaaattttcggagaaagcctttctgattgaaccaattaaagcgaaggttgaactgacggagaacgataaacgtctgctcggaatctttagcgaatatgttacctggaaccgcgtcagtaacgtactgtcacatattggctcagtgaccgcgaaagattttggccgtgttgtgggtctgacgatgaaagacatcattcgcgaagcagcacgcgaaggccatgatctgttgttcgctgataacccgtcggcggtgctgaaggagctgacaggcctcatccagaacacgattcgctccaaatggcacgaagttctggag

SEQ ID NO: 2774 - protein, 346 aa, synthetic construct
  REGION 1..346: note = variant of RNA ligase 2 from Klebsiella phage KP179
MHHHHHHGGSNMFAYYSSLENHTNAKFISKIRGAGFLSHTVEWVAREKIHGTNFSVIITPTEIVPAKRTGPILEDESFFGHEIIMKKYMDSFKKVQNMLNAMDLVSVQIFGEFAGGGIQKGFDYGDKDFYVFDILSDSGNEKVYWDDYRVESFCTTVGLKLAPLLGRGSFAELSQYPNDFKSLVNRYNELVDTVGLEMANKHVFGPQASSEEGLAEGYVLKPVYPRFFNVGTRVAIKCKNSKFSEKAFLIEPIKAKVELTENDKRLLGIFSEYVTWNRVSNVLSHIGSVTAKDFGRVVGLTMKDIIREAAREGHDLLFADNPSAVLKELTGLIQNTIRSKWHEVLE

SEQ ID NO: 2775 - DNA, 1038 bp, synthetic construct
  misc_feature 1..1038: note = variant of RNA ligase 2 from Klebsiella phage KP179
  source 1..1038: mol_type = other DNA
atgcatcaccatcaccatcacggtggcagcaacatgtttgcgtattattcaagtctggaaaaccataccaatgccaagttccttagcaagatccgtggtgcaggcttcctgagccacaccgtggaatgggtagctcgcgagaagattcatggaacgaactttagcgttatcattactccgaccgaaatcgtgccggccaaacgcacagggccgatcttggaagacgagagcttctttggtcatgaaattatcatgaaaaaatatatggactccttcaaaaaggtgcagaacatgctgaatgcgatggatcttgttagcgtgcaaatctttggcgaatttgcgggtggtggcattcagaaaggctttgattacggagacaaagatttctatgtgtttgacatcctgtctgatagcgggaacgagaaaacctactgggatgactatcgcgtcgaatcgttttgcaccactgttggtctgaaattagcgcctctgctgggacgtggtagtttcgctgaactgtcccagtacccaaacgatttcaaaagcctggtgaaccgttataatgaattggttgatacggtcggcctggagatggccaataaacacgtctttggtccgcaagcgtcttctgaagaaggcctggcagaaggctacgttcttaaacccgtctatccgcgcttctttaatgtgggtacgcgcgtggcgattaaatgcaagaactccaaattttcggagaaagcctttctgattgaaccaattaaagcgaaggttgaactgacggagaacgataaacgtctgctcggaatctttagcgaatatgttacctggaaccgcgtcagtaacgtactgtcacatattggctcagtgaccgcgaaagattttggccgtgttgtgggtctgacgatgaaagacatcattcgcgaagcagcacgcgaaggccatgatctgttgttcgctgataacccgtcggcggtgctgaaggagctgacaggcctcatccagaacatcattcgctccaaatggcacgaagttctggag

SEQ ID NO: 2776 - protein, 346 aa, synthetic construct
  REGION 1..346: note = variant of RNA ligase 2 from Klebsiella phage KP179
MHHHHHHGGSNMFAYYSSLENHTNAKFLSKIRGAGFLSHTVEWVAREKIHGTNFSVIITPTEIVPAKRTGPILEDESFFGHEIIMKKYMDSFKKVQNMLNAMDLVSVQIFGEFAGGGIQKGFDYGDKDFYVFDILSDSGNEKTYWDDYRVESFCTTVGLKLAPLLGRGSFAELSQYPNDFKSLVNRYNELVDTVGLEMANKHVFGPQASSEEGLAEGYVLKPVYPRFFNVGTRVAIKCKNSKFSEKAFLIEPIKAKVELTENDKRLLGIFSEYVTWNRVSNVLSHIGSVTAKDFGRVVGLTMKDIIREAAREGHDLLFADNPSAVLKELTGLIQNIIRSKWHEVLE

SEQ ID NO: 2777 - DNA, 1038 bp, synthetic construct
  misc_feature 1..1038: note = variant of RNA ligase 2 from Klebsiella phage KP179
  source 1..1038: mol_type = other DNA
atgcatcaccatcaccatcacggtggcagcaacatgtttgcgtattattcaagtctggaaaaccataccaatgccaagttcattagcaagatccgtggtgcaggcttcctgagccacaccgtggaatgggtagctcgcgagaagattcatggaacgaactttagcgttatcattactccgaccgaaatcgtgccggccaaacgcacagggccgatcttggaagacgagagcttctttggtcatgaaattatcatgaaaaaatatatggactccttcaaaaagattcagaacatgctgaatgcgatggatcttgttagcgtgcaaatctttggcgaatttgcgggtggtggcattcagaaaggctttgattacggagacaaagatttctatgtgtttgacatcctgtctgatagcgggaacgagaaaacctactgggatgactatcgcgtcgaatcgttttgcaccactgttggtctgaaattagcgcctctgctgggacgtggtagtttcgctgaactgtcccagtacccaaacgatttcaaaagcctggtgaaccgttataatgaattggttgatacggtcggcctggagatggccaataaacacgtctttggtccgcaagcgtcttctgaagaaggcctggcagaaggctacgttcttaaacccgtctatccgcgcttctttaatgtgggtacgcgcgtggcgattaaatgcaagaactccaaattttcggagaaagcctttctgattgaaccaattaaagcgaaggttgaactgacggagaacgataaacgtctgctcggaatctttagcgaatatgttacctggaaccgcgtcagtaacgtactgtcacatattggctcagtgaccgcgaaagattttggccgtgttgtgggtctgacgatgaaagacatcattcgcgaagcagcacgcgaaggccatgatctgttgttcgctgataacccgtcggcggtgctgaaggagctgacaggcctcatccagaacacgattcgctccaaatggcacgaagttctggag

SEQ ID NO: 2778 - protein, 346 aa, synthetic construct
  REGION 1..346: note = variant of RNA ligase 2 from Klebsiella phage KP179
MHHHHHHGGSNMFAYYSSLENHTNAKFISKIRGAGFLSHTVEWVAREKIHGTNFSVIITPTEIVPAKRTGPILEDESFFGHEIIMKKYMDSFKKIQNMLNAMDLVSVQIFGEFAGGGIQKGFDYGDKDFYVFDILSDSGNEKTYWDDYRVESFCTTVGLKLAPLLGRGSFAELSQYPNDFKSLVNRYNELVDTVGLEMANKHVFGPQASSEEGLAEGYVLKPVYPRFFNVGTRVAIKCKNSKFSEKAFLIEPIKAKVELTENDKRLLGIFSEYVTWNRVSNVLSHIGSVTAKDFGRVVGLTMKDIIREAAREGHDLLFADNPSAVLKELTGLIQNTIRSKWHEVLE

SEQ ID NO: 2779 - DNA, 1038 bp, synthetic construct
  misc_feature 1..1038: note = variant of RNA ligase 2 from Klebsiella phage KP179
  source 1..1038: mol_type = other DNA
atgcatcaccatcaccatcacggtggcagcaacatgtttgcgtattattcaagtctggaaaaccataccaatgccaagttcattagcaagatccgtggtgcaggcttcctgagccacaccgtggaatgggtagctcgcgagaagattcatggaacgaactttagcgttatcattactccgaccgaaatcgtgccggccaaacgcacagggccgatcttggaagacgagagcttctttggtcatgaaattatcatgaaaaaatatatggactccttcaaaaaggtgcagaacatgctgaatgcgatggatcttgttagcgtgcaaatctttggcgaatttgcgggtggtggcattcagaaaggctttgattacggagacaaagatttctatgtgtttgacatcctgtctgatagcgggaacgagaaagtgtactgggatgactatcgcgtcgaatcgttttgcaccactgttggtctgaaattagcgcctctgctgggacgtggtagtttcgctgaactgtcccagtacccaaacgatttcaaaagcctggtgaaccgttataatgaattggttgatacggtcggcctggagatggccaataaacacgtctttggtccgcaagcgtcttctgaagaaggcctggcagaaggctacgttcttaaacccgtctatccgcgcttctttaatgtgggtacgcgcgtggcgattaaatgcaagaactccaaattttcggagaaagcctttctgattgaaccaattaaagcgaaggttgaactgacggagaacgataaacgtctgctcggaatctttagcgaatatgttacctggaaccgcgtcaacaacgtactgtcacatattggctcagtgaacgccaaagattttgtccgtgtttcgggtctgacgatgaaagacatcattcgcgaagcagcacgcgaaggccatgatctgttgttcgctgataacccgtcggcggtgctgaaggagctgacaggcctcatccagaacacgattcgctccaaatggcacgaagttctggag

SEQ ID NO: 2780 - protein, 346 aa, synthetic construct
  REGION 1..346: note = variant of RNA ligase 2 from Klebsiella phage KP179
MHHHHHHGGSNMFAYYSSLENHTNAKFISKIRGAGFLSHTVEWVAREKIHGTNFSVIITPTEIVPAKRTGPILEDESFFGHEIIMKKYMDSFKKVQNMLNAMDLVSVQIFGEFAGGGIQKGFDYGDKDFYVFDILSDSGNEKVYWDDYRVESFCTTVGLKLAPLLGRGSFAELSQYPNDFKSLVNRYNELVDTVGLEMANKHVFGPQASSEEGLAEGYVLKPVYPRFFNVGTRVAIKCKNSKFSEKAFLIEPIKAKVELTENDKRLLGIFSEYVTWNRVNNVLSHIGSVNAKDFVRVSGLTMKDIIREAAREGHDLLFADNPSAVLKELTGLIQNTIRSKWHEVLE

SEQ ID NO: 2781 - DNA, 1038 bp, synthetic construct
  misc_feature 1..1038: note = variant of RNA ligase 2 from Klebsiella phage KP179
  source 1..1038: mol_type = other DNA
atgcatcaccatcaccatcacggtggcagcaacatgtttgcgtattattcaagtctggaaaaccataccaatgccaagttcattagcaagatccgtggtgcaggcttcctgagccacaccgtggaatgggtagctcgcgagaagattcatggaacgaactttagcgttatcattactccgaccgaaatcgtgccggccaaacgcacagggccgatcttggaagacgagagcttctttggtcatgaaattatcatgaaaaaatatatggactccttcaaaaaggttcagaacatgctgaatgcgatggatcttgttagcgtgcaaatctttggcgaatttgcgggtggtggcattcagaaaggctttgattacggagacaaagatttctatgtgtttgacatcctgtctgatagcgggaacgagaaaacctactgggatgactatcgcgtcgaatcgttttgcaccactgttggtctgaaattagcgcctctgctgggacgtggtagtttcgctgaactgtcccagtacccaaacgatttcaaaagcctggtgaaccgttataatgaattggttgatacggtcggcctggagatggccaataaacacgtctttggtccgcaagcgtcttctgaagaaggcctggcagaaggctacgttcttaaacccgtctatccgcgcttctttaatgtgggtacgcgcgtggcgattaaatgcaagaactccaaattttcggagaaagcctttctgattgaaccaattaaagcgaaggttgaactgacggagaacgataaacgtctgctcggaatctttagcgaatatgttacctggaaccgcgtcagtaacgtactgtcacatattggctcagtgacctcgaaagattttgtccgtgttgtgggtctgacgatgaaagacatcattcgcgaagcagcacgcgaaggccatgatctgttgttcgctgataacccgtcggcggtgctgaaggagctgacaggcctcatccagaacacgattcgctccaaatggcacgaagttctggag

SEQ ID NO: 2782 - protein, 346 aa, synthetic construct
  REGION 1..346: note = variant of RNA ligase 2 from Klebsiella phage KP179
MHHHHHHGGSNMFAYYSSLENHTNAKFISKIRGAGFLSHTVEWVAREKIHGTNFSVIITPTEIVPAKRTGPILEDESFFGHEIIMKKYMDSFKKVQNMLNAMDLVSVQIFGEFAGGGIQKGFDYGDKDFYVFDILSDSGNEKTYWDDYRVESFCTTVGLKLAPLLGRGSFAELSQYPNDFKSLVNRYNELVDTVGLEMANKHVFGPQASSEEGLAEGYVLKPVYPRFFNVGTRVAIKCKNSKFSEKAFLIEPIKAKVELTENDKRLLGIFSEYVTWNRVSNVLSHIGSVTSKDFVRVVGLTMKDIIREAAREGHDLLFADNPSAVLKELTGLIQNTIRSKWHEVLE

SEQ ID NO: 2783 - DNA, 1038 bp, synthetic construct
  misc_feature 1..1038: note = variant of RNA ligase 2 from Klebsiella phage KP179
  source 1..1038: mol_type = other DNA
atgcatcaccatcaccatcacggtggcagcaacatgtttgcgtattattcaagtctggaaaaccataccaatgccaagttcattagcaagatccgtggtgcaggcttcctgagccacaccgtggaatgggtagctcgcgagaagattcatggaacgaactttagcgttattattactccgaccgaaatcgtgccggccaaacgcacagggccgatcttggaagacgagagcttctttggtcatgaaattatcatgaaaaaatatatggactccttcaaaaaggttcagaacatgctgaatgcgatggatcttgttcgcgtgcaaatctttggcgaatttgcgggtggtggcattcagaaaggctttgattacggagacaaagatttctatgtgtttgacatcctgtctgatagcgggaacgagaaaagctactgggatgactatcgcgtcgaatcgttttgcaccactgttggtctgaaattagcgcctctgctgggacgtggtagtttcgctgaactgtcccagtacccaaacgatttcaaaagcctggtgaaccgttataatgaattggttgatacggtcggcctggagatggccaataaacacgtctttggtccgcaagcgtcttctgaagaaggcctggcagaaggctacgttcttaaacccgtctatccgcgcttctttaatgtgggtacgcgcgtggcgattaaatgcaagaactccaaattttcggagaaagcctttctgattgaaccaattaaagcgaaggttgaactgacggagaacgatgaacgtctgctcggaatctttagcgaatatgttacctggaaccgcgtcttgaacgtactgtcacatattggctcagtgacccagaaagattttggccgtgttgtgggtctgacgatgaaagacatcattcgcgaagcagcacgcgaaggccatgatctgttgttcgctgataacccgtcggcggtgctgaaggagctgacaggcctcatccagaacacgattcgctccaaatggcacgaagttctggag

SEQ ID NO: 2784 - protein, 346 aa, synthetic construct
  REGION 1..346: note = variant of RNA ligase 2 from Klebsiella phage KP179
MHHHHHHGGSNMFAYYSSLENHTNAKFISKIRGAGFLSHTVEWVAREKIHGTNFSVIITPTEIVPAKRTGPILEDESFFGHEIIMKKYMDSFKKVQNMLNAMDLVRVQIFGEFAGGGIQKGFDYGDKDFYVFDILSDSGNEKSYWDDYRVESFCTTVGLKLAPLLGRGSFAELSQYPNDFKSLVNRYNELVDTVGLEMANKHVFGPQASSEEGLAEGYVLKPVYPRFFNVGTRVAIKCKNSKFSEKAFLIEPIKAKVELTENDERLLGIFSEYVTWNRVLNVLSHIGSVTQKDFGRVVGLTMKDIIREAAREGHDLLFADNPSAVLKELTGLIQNTIRSKWHEVLE

SEQ ID NO: 2785 - DNA, 1038 bp, synthetic construct
  misc_feature 1..1038: note = variant of RNA ligase 2 from Klebsiella phage KP179
  source 1..1038: mol_type = other DNA
atgcatcaccatcaccatcacggtggcagcaacatgtttgcgtattattcaagtctggaaaaccataccaatgccaagttcattagcaagatccgtggtgcaggcttcctgagccacaccgtggaatgggtagctcgcgagaagattcatggaacgaactttagcgttatcattactccgaccgaaatcgtgccggccaaacgcacagggccgatcttggaagacgagagcttctttggtcatgaaattatcatgaaaaaatatatggactccttcaaaaaggttcagaacatgctgaatgcgatggatcttgttagcgtgcaaatctttggcgaatttgcgggtggtggcattcagaaaggctttgattacggagacaaagatttctatgtgtttgacatcctgtctgatagcgggaacgagaaaagctactgggatgactatcgcgtcgaatcgttttgcaccactgttggtctgaaattagcgcctctgctgggacgtggtagtttcgctgaactgtcccagtacccaaacgatttcaaaagcctggtgaaccgttataatgaattggttgatacggtcggcctggagatggccaataaacacgtctttggtccgcaagcgtcttctgaagaaggcctggcagaaggctacgttcttaaacccgtctatccgcgcttctttaatgtgggtacgcgcgtggcgattaaatgcaagaactccaaattttcggagaaagcctttctgattgaaccaattaaagcgaaggttgaactgacggagaacgataaacgtctgctcggaatctttagcgaatatgttacctggaaccgcgtcttgaacgtactgtcacatattggctcagtgacccagaaagattttggccgtgttgtgggtctgacgatgaaagacatcattcgcgaagcagcacgcgaaggccatgatctgttgttcgctgataacccgtcggcggtgctgaaggagctggccggcctcatccagaacacgattcgctccaaatggcacgaagttctggag

SEQ ID NO: 2786 - protein, 346 aa, synthetic construct
  REGION 1..346: note = variant of RNA ligase 2 from Klebsiella phage KP179
MHHHHHHGGSNMFAYYSSLENHTNAKFISKIRGAGFLSHTVEWVAREKIHGTNFSVIITPTEIVPAKRTGPILEDESFFGHEIIMKKYMDSFKKVQNMLNAMDLVSVQIFGEFAGGGIQKGFDYGDKDFYVFDILSDSGNEKSYWDDYRVESFCTTVGLKLAPLLGRGSFAELSQYPNDFKSLVNRYNELVDTVGLEMANKHVFGPQASSEEGLAEGYVLKPVYPRFFNVGTRVAIKCKNSKFSEKAFLIEPIKAKVELTENDKRLLGIFSEYVTWNRVLNVLSHIGSVTQKDFGRVVGLTMKDIIREAAREGHDLLFADNPSAVLKELAGLIQNTIRSKWHEVLE

SEQ ID NO: 2787 - DNA, 1038 bp, synthetic construct
  misc_feature 1..1038: note = variant of RNA ligase 2 from Klebsiella phage KP179
  source 1..1038: mol_type = other DNA
atgcatcaccatcaccatcacggtggcagcaacatgtttgcgtattattcaagtctggaaaaccataccaatgccaagttccttagcaagatccgtggtgcaggcttcctgagccacaccgtggaatgggtagctcgcgagaagattcatggaacgaactttagcgttatcattactccgaccgaaatcgtgccggccaaacgcacagggccgatcttggaagacgagagcttctttggtcatgaaattatcatgaaaaaatatatggactccttcaaaaaggttcagaacatgctgaatgcgatggatcttgttatggtgcaaatctttggcgaatttgcgggtggtggcattcagaaaggctttgattacggagacaaagatttctatgtgtttgacatcctgtctgatagcgggaacgagaaaagctactgggatgactatcgcgtcgaatcgttttgcaccactgttggtctgaaattagcgcctctgctgggacgtggtagtttcgctgaactgtcccagtacccaaacgatttcaaaagcctggtgaaccgttataatgaattggttgatacggtcggcctggagatggccaataaacacgtctttggtccgcaagcgtcttctgaagaaggcctggcagaaggctacgttcttaaacccgtctatccgcgcttctttaatgtgggtacgcgcgtggcgattaaatgcaagaactccaaattttcggagaaagcctttctgattgaaccaattaaagcgaaggttgaactgacggagaacgatagccgtctgctcggaatctttagcgaatatgttacctggaaccgcgtctcgaacgtactgtcacatattggctcagtgaccagcaaagattttggccgtgttgtgggtctgacgatgaaagacatcattcgcgaagcagcacgcgaaggccatgatctgttgttcgctgataacccgtcggcggtgctgaaggagctgacaggcctcatccagaacacgattcgctccaaatggcacgaagttctggag

SEQ ID NO: 2788 - protein, 346 aa, synthetic construct
  REGION 1..346: note = variant of RNA ligase 2 from Klebsiella phage KP179
MHHHHHHGGSNMFAYYSSLENHTNAKFLSKIRGAGFLSHTVEWVAREKIHGTNFSVIITPTEIVPAKRTGPILEDESFFGHEIIMKKYMDSFKKVQNMLNAMDLVMVQIFGEFAGGGIQKGFDYGDKDFYVFDILSDSGNEKSYWDDYRVESFCTTVGLKLAPLLGRGSFAELSQYPNDFKSLVNRYNELVDTVGLEMANKHVFGPQASSEEGLAEGYVLKPVYPRFFNVGTRVAIKCKNSKFSEKAFLIEPIKAKVELTENDSRLLGIFSEYVTWNRVSNVLSHIGSVTSKDFGRVVGLTMKDIIREAAREGHDLLFADNPSAVLKELTGLIQNTIRSKWHEVLE

SEQ ID NO: 2789 - DNA, 1038 bp, synthetic construct
  misc_feature 1..1038: note = variant of RNA ligase 2 from Klebsiella phage KP179
  source 1..1038: mol_type = other DNA
atgcatcaccatcaccatcacggtggcagcaacatgtttgcgtattattcaagtctggaaaaccataccaatgccaagttccttagcaagatccgtggtgcaggcttcctgagccacaccgtggaatgggtagctcgcgagaagattcatggaacgaactttagcgttatcattactccgaccgaaatcgtgccggccaaacgcacagggccgatcttggaagacgagagcttctttggtcatgaaattatcatgaaaaaatatatggactccttcaaaaaggttcagaacatgctgaatgcgatggatcttgttagcgtgcaaatctttggcgaatttgcgggtggtggcattcagaaaggctttgattacggagacaaagatttctatgtgtttgacatcctgtctgatagcgggaacgagaaaagctactgggatgactatcgcgtcgaatcgttttgcaccactgttggtctgaaattagcgcctctgctgggacgtggtagtttcgctgaactgtcccagtacccaaacgatttcaaaagcctggtgaaccgttataatgaattggttgatacggtcggcctggagatggccaataaacacgtctttggtccgcaagcgtcttctgaagaaggcctggcagaaggctacgttcttaaacccgtctatccgcgcttctttaatgtgggtacgcgcgtggcgattaaatgcaagaactccaaattttcggagaaagcctttctgattgaaccaattaaagcgaaggttgaactgacggagaacgatgaacgtctgctcggaatctttagcgaatatgttacctggaaccgcgtcttgaacgtactgtcacatattggctcagtgacccagaaagattttggccgtgttgtgggtctgacgatgaaagacatcattcgcgaagcagcacgcgaaggccatgatctgttgttcgctgataacccgtcggcggtgctgaaggagctggccggcctcatccagaacacgattcgctccaaatggcacgaagttctggag

SEQ ID NO: 2790 - protein, 346 aa, synthetic construct
  REGION 1..346: note = variant of RNA ligase 2 from Klebsiella phage KP179
MHHHHHHGGSNMFAYYSSLENHTNAKFLSKIRGAGFLSHTVEWVAREKIHGTNFSVIITPTEIVPAKRTGPILEDESFFGHEIIMKKYMDSFKKVQNMLNAMDLVSVQIFGEFAGGGIQKGFDYGDKDFYVFDILSDSGNEKSYWDDYRVESFCTTVGLKLAPLLGRGSFAELSQYPNDFKSLVNRYNELVDTVGLEMANKHVFGPQASSEEGLAEGYVLKPVYPRFFNVGTRVAIKCKNSKFSEKAFLIEPIKAKVELTENDERLLGIFSEYVTWNRVLNVLSHIGSVTQKDFGRVVGLTMKDIIREAAREGHDLLFADNPSAVLKELAGLIQNTIRSKWHEVLE

SEQ ID NO: 2791 - DNA, 1038 bp, synthetic construct
  misc_feature 1..1038: note = variant of RNA ligase 2 from Klebsiella phage KP179
  source 1..1038: mol_type = other DNA
atgcatcaccatcaccatcacggtggcagcaacatgtttgcgtattattcaagtctggaaaaccataccaatgccaagttcattagcaagatccgtggtgcaggcttcctgagccacaccgtggaatgggtagctcgcgagaagattcatggaacgaactttagcgttgttattactcgcaccgaaatcgtgccggccaaacgcacagggccgatcttggaagacgagagcttctttggtcatgaaattatcatgaaaaaatatatggactccttcaaaaaggttcagaacatgctgaatgcgatggatcttgttagcgtgcaaatctttggcgaatttgcgggtggtggcattcagaaaggctttgattacggagacaaagatttctatgtgtttgacatcgtgtctgatagcgggaacgagaaaagctactgggatgactatcgcgtcgaatcgttttgcaccactgttggtctgaaattagcgcctctgctgggacgtggtagtttcgctgaactgtcccagtacccaaacgatttcaaaagcctggtgaaccgttataatgaattggttgatacggtcggcctggagatggccaataaacacgtctttggtccgcaagcgtcttctgaagaaggcctggcagaaggctacgttcttaaacccgtctatccgcgcttctttaatgtgggtacgcgcgtggcgattaaatgcaagaactccaaattttcggagaaagcctttctgattgaaccaattaaagcgaaggttgaactgacggagaacgatagccgtctgctcggaatctttagcgaatatgttacctggaaccgcgtcagtaacgtactgtcacatattggctcagtgaccagcaaagattttggccgtgttgtgggtctgacgatgaaagacatcattcgcgaagcagcacgcgaaggccatgatctgttgttcgctgataacccgtcggcggtgctgaaggagctgacaggcctcatccagaacacgattcgctccaaatggcacgaagttctggag

SEQ ID NO: 2792 - protein, 346 aa, synthetic construct
  REGION 1..346: note = variant of RNA ligase 2 from Klebsiella phage KP179
MHHHHHHGGSNMFAYYSSLENHTNAKFISKIRGAGFLSHTVEWVAREKIHGTNFSVVITRTEIVPAKRTGPILEDESFFGHEIIMKKYMDSFKKVQNMLNAMDLVSVQIFGEFAGGGIQKGFDYGDKDFYVFDIVSDSGNEKSYWDDYRVESFCTTVGLKLAPLLGRGSFAELSQYPNDFKSLVNRYNELVDTVGLEMANKHVFGPQASSEEGLAEGYVLKPVYPRFFNVGTRVAIKCKNSKFSEKAFLIEPIKAKVELTENDSRLLGIFSEYVTWNRVSNVLSHIGSVTSKDFGRVVGLTMKDIIREAAREGHDLLFADNPSAVLKELTGLIQNTIRSKWHEVLE

SEQ ID NO: 2793 - DNA, 1038 bp, synthetic construct
  misc_feature 1..1038: note = variant of RNA ligase 2 from Klebsiella phage KP179
  source 1..1038: mol_type = other DNA
atgcatcaccatcaccatcacggtggcagcaacatgtttgcgtattattcaagtctggaaaaccataccaatgccaagttccttagcaagatccgtggtgcaggcttcctgagccacaccgtggaatgggtagctcgcgagaagattcatggaacgaactttagcgttatcattactccgaccgaaatcgtgccggccaaacgcacagggccgatcttggaagacgagagcttctttggtcatgaaattatcatgaaaaaatatatggactccttcaaaaaggttcagaacatgctaaatgcgatggatcttgttagcgtgcaaatctttggcgaatttgcgggtggtggcattcagaaaggctttgattacggagacaaagatttctatgtgtttgacatcgtgtctgatagcgggaacgagaaaagctactgggatgactatcgcgtcgaatcgttttgcaccactgttggtctgaaattagcgcctctgctgggacgtggtagtttcgctgaactgtcccagtacccaaacgatttcaaaagcctggtgaaccgttataatgaattggttgatacggtcggcctggagatggccaataaacacgtctttggtccgcaagcgtcttctgaagaaggcctggcagaaggctacgttcttaaacccgtctatccgcgcttctttaatgtgggtacgcgcgtggcgattaaatgcaagaactccaaattttcggagaaagcctttctgattgaaccaattaaagcgaaggttgaactgacggagaacgatagccgtctgctcggaatctttagcgaatatgttacctggaaccgcgtcttgaacgtactgtcacatattggctcagtgacccagaaagattttggccgtgttgtgggtctgacgatgaaagacatcattcgcgaagcagcacgcgaaggccatgatctgttgttcgctgataacccgtcggcggtgctgaaggagctgaccggcctcatccagaacacgattcgctccaaatggcacgaagttctggag

SEQ ID NO: 2794 - protein, 346 aa, synthetic construct
  REGION 1..346: note = variant of RNA ligase 2 from Klebsiella phage KP179
MHHHHHHGGSNMFAYYSSLENHTNAKFLSKIRGAGFLSHTVEWVAREKIHGTNFSVIITPTEIVPAKRTGPILEDESFFGHEIIMKKYMDSFKKVQNMLNAMDLVSVQIFGEFAGGGIQKGFDYGDKDFYVFDIVSDSGNEKSYWDDYRVESFCTTVGLKLAPLLGRGSFAELSQYPNDFKSLVNRYNELVDTVGLEMANKHVFGPQASSEEGLAEGYVLKPVYPRFFNVGTRVAIKCKNSKFSEKAFLIEPIKAKVELTENDSRLLGIFSEYVTWNRVLNVLSHIGSVTQKDFGRVVGLTMKDIIREAAREGHDLLFADNPSAVLKELTGLIQNTIRSKWHEVLE

SEQ ID NO: 2795 - DNA, 1038 bp, synthetic construct
  misc_feature 1..1038: note = variant of RNA ligase 2 from Klebsiella phage KP179
  source 1..1038: mol_type = other DNA
atgcatcaccatcaccatcacggtggcagcaacatgtttgcgtattattcaagtctggaaaaccataccaatgccaagttcattagcaagatccgtggtgcaggcttcctgagccacaccgtggaatgggtagctcgcgagaagattcatggaacgaactttagcgttatcattactccgaccgaaatcgtgccggccaaacgcacagggccgatcttggaagacgagagcttctttggtcatgaaattatcatgaaaaaatatatggactccttcaaaaaggttcagaacatgctgaatgcgatggatcttgttctggtgcaaatctttggcgaatttgcgggtggtggcattcagaaaggctttgattacggagacaaagatttctatgtgtttgacatcctgtctgatagcgggaacgagaaaagctactgggatgactatcgcgtcgaatcgttttgcaccactgttggtctgaaattagcgcctctgctgggacgtggtagtttcgctgaactgtcccagtacccaaacgatttcaaaagcctggtgaaccgttataatgaattggttgatacggtcggcctggagatggccaataaacacgtctttggtccgcaagcgtcttctgaagaaggcctggcagaaggctacgttcttaaacccgtctatccgcgcttctttaatgtgggtacgcgcgtggcgattaaatgcaagaactccaaattttcggagaaagcctttctgattgaaccaattaaagcgaaggttgaactgacggagaacgatgaacgtctgctcggaatctttagcgaatatgttacctggaaccgcgtcttgaacgtactgtcacatattggctcagtgaccagcaaagattttggccgtgttgtgggtctgacgatgaaagacatcattcgcgaagcagcacgcgaaggccatgatctgttgttcgctgataacccgtcggcggtgctgaaggagctgacaggcctcatccagaacacgattcgctccaaatggcacgaagttctggag

SEQ ID NO: 2796 - protein, 346 aa, synthetic construct
  REGION 1..346: note = variant of RNA ligase 2 from Klebsiella phage KP179
MHHHHHHGGSNMFAYYSSLENHTNAKFISKIRGAGFLSHTVEWVAREKIHGTNFSVIITPTEIVPAKRTGPILEDESFFGHEIIMKKYMDSFKKVQNMLNAMDLVLVQIFGEFAGGGIQKGFDYGDKDFYVFDILSDSGNEKSYWDDYRVESFCTTVGLKLAPLLGRGSFAELSQYPNDFKSLVNRYNELVDTVGLEMANKHVFGPQASSEEGLAEGYVLKPVYPRFFNVGTRVAIKCKNSKFSEKAFLIEPIKAKVELTENDERLLGIFSEYVTWNRVLNVLSHIGSVTSKDFGRVVGLTMKDIIREAAREGHDLLFADNPSAVLKELTGLIQNTIRSKWHEVLE

SEQ ID NO: 2797 - DNA, 1038 bp, synthetic construct
  misc_feature 1..1038: note = variant of RNA ligase 2 from Klebsiella phage KP179
  source 1..1038: mol_type = other DNA
atgcatcaccatcaccatcacggtggcagcaacatgtttgcgtattattcaagtctggaaaaccataccaatgccaagttccttagcaagatccgtggtgcaggcttcctgagccacaccgtggaatgggtagctcgcgagaagattcatggaacgaactttagcgttatcattactccgaccgaaatcgtgccggccaaacgcacagggccgatcttggaagacgagagcttctttggtcatgaaattatcatgaaaaaatatatggactccttcaaaaaggttcagaacatgctaaatgcgatggatcttgttctggtgcaaatctttggcgaatttgcgggtggtggcattcagaaaggctttgattacggagacaaagatttctatgtgtttgacatcctgtctgatagcgggaacgagaaaagctactgggatgactatcgcgtcgaatcgttttgcaccactgttggtctgaaattagcgcctctgctgggacgtggtagtttcgctgaactgtcccagtacccaaacgatttcaaaagcctggtgaaccgttataatgaattggttgatacggtcggcctggagatggccaataaacacgtctttggtccgcaagcgtcttctgaagaaggcctggcagaaggctacgttcttaaacccgtctatccgcgcttctttaatgtgggtacgcgcgtggcgattaaatgcaagaactccaaattttcggagaaagcctttctgattgaaccaattaaagcgaaggttgaactgacggagaacgatagccgtctgctcggaatctttagcgaatatgttacctggaaccgcgtcttgaacgtactgtcacatattggctcagtgacccagaaagattttggccgtgttgtgggcctgacgatgaaagacatcattcgcgaagcagcacgcgaaggccatgatctgttgttcgctgataacccgtcggcggtgctgaaggagctgacaggcctcatccagaacacgattcgctccaaatggcacgaagttctggag

SEQ ID NO: 2798 - protein, 346 aa, synthetic construct
  REGION 1..346: note = variant of RNA ligase 2 from Klebsiella phage KP179
MHHHHHHGGSNMFAYYSSLENHTNAKFLSKIRGAGFLSHTVEWVAREKIHGTNFSVIITPTEIVPAKRTGPILEDESFFGHEIIMKKYMDSFKKVQNMLNAMDLVLVQIFGEFAGGGIQKGFDYGDKDFYVFDILSDSGNEKSYWDDYRVESFCTTVGLKLAPLLGRGSFAELSQYPNDFKSLVNRYNELVDTVGLEMANKHVFGPQASSEEGLAEGYVLKPVYPRFFNVGTRVAIKCKNSKFSEKAFLIEPIKAKVELTENDSRLLGIFSEYVTWNRVLNVLSHIGSVTQKDFGRVVGLTMKDIIREAAREGHDLLFADNPSAVLKELTGLIQNTIRSKWHEVLE

SEQ ID NO: 2799 - DNA, 1038 bp, synthetic construct
  misc_feature 1..1038: note = variant of RNA ligase 2 from Klebsiella phage KP179
  source 1..1038: mol_type = other DNA
atgcatcaccatcaccatcacggtggcagcaacatgtttgcgtattattcaagtctggaaaaccataccaatgccaagttcattagcaagatccgtggtgcaggcttcctgagccacaccgtggaatgggtagctcgcgagaagattcatggaacgaactttagcgttatcattactccgaccgaaatcgtgccggccaaacgcacagggccgatcttggaagacgagagcttctttggtcatgaaattatcatgaaaaaatatatggactccttcaaaaaggttcagaacatgctaaatgcgatggatcttgttagcgtgcaaatctttggcgaatttgcgggtggtggcattcagaaaggctttgattacggagacaaagatttctatgtgtttgacatcctgtctgatagcgggaacgagaaaagctactgggatgactatcgcgtcgaatcgttttgcaccactgttggtctgaaattagcgcctctgctgggacgtggtagtttcgctgaactgtcccagtacccaaacgatttcaaaagcctggtgaaccgttataatgaattggttgatacggtcggcctggagatggccaataaacacgtctttggtccgcaagcgtcttctgaagaaggcctggcagaaggctacgttcttaaacccgtctatccgcgcttctttaatgtgggtacgcgcgtggcgattaaatgcaagaactccaaattttcggagaaagcctttctgattgaaccaattaaagcgaaggttgaactgacggagaacgataaacgtctgctcggaatctttagcgaatatgttacctggaaccgcgtcttgaacgtactgtcacatattggctcagtgacccagaaagattttggccgtgttgtgattctgacgatgaaagacatcattcgcgaagcagcacgcgaaggccatgatctgttgttcgctgataacccgtcggcggtgctgaaggagctgacaggcctcatccagaacacgattcgctccaaatggcacgaagttctggag

SEQ ID NO: 2800 - protein, 346 aa, synthetic construct
  REGION 1..346: note = variant of RNA ligase 2 from Klebsiella phage KP179
MHHHHHHGGSNMFAYYSSLENHTNAKFISKIRGAGFLSHTVEWVAREKIHGTNFSVIITPTEIVPAKRTGPILEDESFFGHEIIMKKYMDSFKKVQNMLNAMDLVSVQIFGEFAGGGIQKGFDYGDKDFYVFDILSDSGNEKSYWDDYRVESFCTTVGLKLAPLLGRGSFAELSQYPNDFKSLVNRYNELVDTVGLEMANKHVFGPQASSEEGLAEGYVLKPVYPRFFNVGTRVAIKCKNSKFSEKAFLIEPIKAKVELTENDKRLLGIFSEYVTWNRVLNVLSHIGSVTQKDFGRVVILTMKDIIREAAREGHDLLFADNPSAVLKELTGLIQNTIRSKWHEVLE

SEQ ID NO: 2801 - DNA, 1038 bp, synthetic construct
  misc_feature 1..1038: note = variant of RNA ligase 2 from Klebsiella phage KP179
  source 1..1038: mol_type = other DNA
atgcatcaccatcaccatcacggtggcagcaacatgtttgcgtattattcaagtctggaaaaccataccaatgccaagttccttagcaagatccgtggtgcaggcttcctgagccacaccgtggaatgggtagctcgcgagaagattcatggaacgaactttagcgttgttattactccgaccgaaatcgtgccggccaaacgcacagggccgatcttggaagacgagagcttctttggtcatgaaattatcatgaaaaaatatggcgactccttcaaaaaggttcagaacatgctgaatgcgatggatcttgttctggtgcaaatctttggcgaatttgcgggtggtggcattcagaaaggctttgattacggagacaaagatttctatgtgtttgacatcctgtctgatagcgggaacgagaaaagctactgggatgactatcgcgtcgaatcgttttgcaccactgttggtctgaaattagcgcctctgctgggacgtggtagtttcgctgaactgtcccagtacccaaacgatttcaaaagcctggtgaaccgttataatgaattggttgatacggtcggcctggagatggccaataaacacgtctttggtccgcaagcgtcttctgaagaaggcctggcagaaggctacgttcttaaacccgtctatccgcgcttctttaatgtgggtacgcgcgtggcgattaaatgcaagaactccaaattttcggagaaagcctttctgattgaaccaattaaagcgaaggttgaactgacggagaacgatagccgtctgctcggaatctttagcgaatatgttacctggaaccgcgtcttgaacgtactgtcacatattggctcagtgaccagcaaagattttggccgtgttgtgggtctgacgatgaaagacatcattcgcgaagcagcacgcgaaggccatgatctgttgttcgctgataacccgtcggcggtgctgaaggagctgacaggcctcatccagaacacgattcgctccaaatggcacgaagttctggag

SEQ ID NO: 2802 - protein, 346 aa, synthetic construct
  REGION 1..346: note = variant of RNA ligase 2 from Klebsiella phage KP179
MHHHHHHGGSNMFAYYSSLENHTNAKFLSKIRGAGFLSHTVEWVAREKIHGTNFSVVITPTEIVPAKRTGPILEDESFFGHEIIMKKYGDSFKKVQNMLNAMDLVLVQIFGEFAGGGIQKGFDYGDKDFYVFDILSDSGNEKSYWDDYRVESFCTTVGLKLAPLLGRGSFAELSQYPNDFKSLVNRYNELVDTVGLEMANKHVFGPQASSEEGLAEGYVLKPVYPRFFNVGTRVAIKCKNSKFSEKAFLIEPIKAKVELTENDSRLLGIFSEYVTWNRVLNVLSHIGSVTSKDFGRVVGLTMKDIIREAAREGHDLLFADNPSAVLKELTGLIQNTIRSKWHEVLE

SEQ ID NO: 2803 - DNA, 1038 bp, synthetic construct
  misc_feature 1..1038: note = variant of RNA ligase 2 from Klebsiella phage KP179
  source 1..1038: mol_type = other DNA
atgcatcaccatcaccatcacggtggcagcaacatgtttgcgtattattcaagtctggaaaaccataccaatgccaagttcattagcaagatccgtggtgcaggcttcctgagccacaccgtggaatgggtagctcgcgagaagattcatggaacgaactttagcgttatcattactccgaccgaaatcgtgccggccaaacgcacagggccgatcttggaagacgagagcttctttggtcatgaaattatcatgaaaaaatatatggactccttcaaaaaggttcagaacatgctgaatgcgatggatcttgttagcgtgcaaatctttggcgaatttgcgggtggtggcattcagaaaggctttgattacggagacaaagatttctatgtgtttgacatcctgtctgatagcgggaacgagaaaagctactgggatgactatcgcgtcgaatcgttttgcaccactgttggtctgaaattagcgcctctgctgggacgtggtagtttcgctgaactgtcccagtacccaaacgatttcaaaagcctggtgaaccgttataatgaattggttgatacggtcggcctggagatggccaataaacacgtctttggtccgcaagcgtcttctgaagaaggcctggcagaaggctacgttcttaaacccgtctatccgcgcttctttaatgtgggtacgcgcgtggcgattaaatgcaagaactccaaattttcggagaaagcctttctgattgaaccaattaaagcgaaggttgaactgacggagaacgatagccgtctgctcggaatctttagcgaatatgttacctggaaccgcgtcagtaacgtactgtcacatattggctcagtgacccagaaagattttggccgtgttgtgggtctgacgatgaaagacatcattcgcgaagcagcacgcgaaggccatgatctgttgttcgctgataacccgtcggcggtgctgaaggagctgacaggcctcatccagaacacgattcgctccaaatggcacgaagttctggag

SEQ ID NO: 2804 - protein, 346 aa, synthetic construct
  REGION 1..346: note = variant of RNA ligase 2 from Klebsiella phage KP179
MHHHHHHGGSNMFAYYSSLENHTNAKFISKIRGAGFLSHTVEWVAREKIHGTNFSVIITPTEIVPAKRTGPILEDESFFGHEIIMKKYMDSFKKVQNMLNAMDLVSVQIFGEFAGGGIQKGFDYGDKDFYVFDILSDSGNEKSYWDDYRVESFCTTVGLKLAPLLGRGSFAELSQYPNDFKSLVNRYNELVDTVGLEMANKHVFGPQASSEEGLAEGYVLKPVYPRFFNVGTRVAIKCKNSKFSEKAFLIEPIKAKVELTENDSRLLGIFSEYVTWNRVSNVLSHIGSVTQKDFGRVVGLTMKDIIREAAREGHDLLFADNPSAVLKELTGLIQNTIRSKWHEVLE

SEQ ID NO: 2805 - DNA, 1038 bp, synthetic construct
  misc_feature 1..1038: note = variant of RNA ligase 2 from Klebsiella phage KP179
  source 1..1038: mol_type = other DNA
atgcatcaccatcaccatcacggtggcagcaacatgtttgcgtattattcaagtctggaaaaccataccaatgccaagttcattagcaagatccgtggtgcaggcttcctgagccacaccgtggaatgggtagctcgcgagaagattcatggaacgaactttagcgttatcattactccgaccgaaatcgtgccggccaaacgcacagggccgatcttggaagacgagagcttctttggtcatgaaattatcatgaaaaaatatatggactccttcaaaaaggttcagaacatgctgaatgcgatggatcttgttagcgtgcaaatctttggcgaatttgcgggtggtggcattcagaaaggctttgattacggagacaaagatttctatgtgtttgacatcctgtctgatagcgggaacgagaaaagctactgggatgactatcgcgtcgaatcgttttgcaccactgttggtctgaaattagcgcctctgctgggacgtggtagtttcgctgaactgtcccagtacccaaacgatttcaaaagcctggtgagccgttataatgaattggttgatacggtcggcctggagatggccaataaacacgtctttggtccgcaagcgtcttctgaagaaggcctggcagaaggctacgttcttaaacccgtctatccgcgcttctttaatgtgggtacgcgcgtggcgattaaatgcaagaactccaaattttcggagaaagcctttctgattgaaccaattaaagcgaaggttgaactgacggagaacgataaacgtctgctcggaatctttagcgaatatgtgacctggaaccgcgtcagtaacgtactgtcacatattggctcagtgaccagcaaagattttggccgtgttgtgggtctgacgatgaaagacattattcgcgaagcagcgcgcgaaggccatgatctgttgttcgctgataacccgtcggcggtgctgaaggagctgacaggcttgatccagaacacgattcgctccaaatggcacgaagttctggag

SEQ ID NO: 2806 - protein, 346 aa, synthetic construct
  REGION 1..346: note = variant of RNA ligase 2 from Klebsiella phage KP179
MHHHHHHGGSNMFAYYSSLENHTNAKFISKIRGAGFLSHTVEWVAREKIHGTNFSVIITPTEIVPAKRTGPILEDESFFGHEIIMKKYMDSFKKVQNMLNAMDLVSVQIFGEFAGGGIQKGFDYGDKDFYVFDILSDSGNEKSYWDDYRVESFCTTVGLKLAPLLGRGSFAELSQYPNDFKSLVSRYNELVDTVGLEMANKHVFGPQASSEEGLAEGYVLKPVYPRFFNVGTRVAIKCKNSKFSEKAFLIEPIKAKVELTENDKRLLGIFSEYVTWNRVSNVLSHIGSVTSKDFGRVVGLTMKDIIREAAREGHDLLFADNPSAVLKELTGLIQNTIRSKWHEVLE

SEQ ID NO: 2807 - DNA, 1038 bp, synthetic construct
  misc_feature 1..1038: note = variant of RNA ligase 2 from Klebsiella phage KP179
  source 1..1038: mol_type = other DNA
atgcatcaccatcaccatcacggtggcagcaacatgtttgcgtattattcaagtctggaaaaccataccaatgccaagttccttagcaagatccgtggtgcaggcttcctgagccacaccgtggaatgggtagctcgcgagaagattcatggaacgaactttagcgttatcattactccgaccgaaatcgtgccggccaaacgcacagggccgatcttggaagacgagagcttctttggtcatgaaattatcatgaaaaaatatatggactccttcaaaaaggttcagaacatgctaaatgcgatggatcttgttatggtgcaaatctttggcgaatttgcgggtggtggcattcagaaaggctttgattacggagacaaagatttctatgtgtttgacatcctgtctgatagcgggaacgagaaaagctactgggatgactatcgcgtcgaatcgttttgcaccactgttggtctgaaattagcgcctctgctgggacgtggtagtttcgctgaactgtcccagtacccaaacgatttcaaaagcctggtgaaccgttataatgaattggttgatacggtcggcctggagatggccaataaacacgtctttggtccgcaagcgtcttctgaagaaggcctggcagaaggctacgttcttaaacccgtctatccgcgcttctttaatgtgggtacgcgcgtggcgattaaatgcaagaactccaaattttcggagaaagcctttctgattgaaccaattaaagcgaaggttgaactgacggagaacgataaacgtctgctcggaatctttagcgaatatgttacctggaaccgcgtctcgaacgtactgtcacatattggctcagtgacccagaaagattttggccgtgttgtggtcctgacgatgaaagacatcattcgcgaagcagcacgcgaaggccatgatctgttgttcgctgataacccgtcggcggtgctgaaggagctgaccggcctcatccagaacacgattcgctccaaatggcacgaagttctggag

SEQ ID NO: 2808 - protein, 346 aa, synthetic construct
  REGION 1..346: note = variant of RNA ligase 2 from Klebsiella phage KP179
MHHHHHHGGSNMFAYYSSLENHTNAKFLSKIRGAGFLSHTVEWVAREKIHGTNFSVIITPTEIVPAKRTGPILEDESFFGHEIIMKKYMDSFKKVQNMLNAMDLVMVQIFGEFAGGGIQKGFDYGDKDFYVFDILSDSGNEKSYWDDYRVESFCTTVGLKLAPLLGRGSFAELSQYPNDFKSLVNRYNELVDTVGLEMANKHVFGPQASSEEGLAEGYVLKPVYPRFFNVGTRVAIKCKNSKFSEKAFLIEPIKAKVELTENDKRLLGIFSEYVTWNRVSNVLSHIGSVTQKDFGRVVVLTMKDIIREAAREGHDLLFADNPSAVLKELTGLIQNTIRSKWHEVLE

SEQ ID NO: 2809 - DNA, 1038 bp, synthetic construct
  misc_feature 1..1038: note = variant of RNA ligase 2 from Klebsiella phage KP179
  source 1..1038: mol_type = other DNA
atgcatcaccatcaccatcacggtggcagcaacatgtttgcgtattattcaagtctggaaaaccataccaatgccaagttccttagcaagatccgtggtgcaggcttcctgagccacaccgtggaatgggtagctcgcgagaagattcatggaacgaactttagcgttattattactccgaccgaaatcgtgccggccaaacgcacagggccgatcttggaagacgagagcttctttggtcatgaaattatcatgaaaaaatatatggactccttcaaaaaggttcagaacatgctgaatgcgatggatcttgttagcgtgcaaatctttggcgaatttgcgggtggtggcattcagaaaggctttgattacggagacaaagatttctatgtgtttgacatcctgtctgatagcgggaacgagaaaagctactgggatgactatcgcgtcgaatcgttttgcaccactgttggtctgaaattagcgcctctgctgggacgtggtagtttcgctgaactgtcccagtacccaaacgatttcaaaagcctggtgaaccgttataatgaattggttgatacggtcggcctggagatggccaataaacacgtctttggtccgcaagcgtcttctgaagaaggctatgcagaaggctacgttcttaaacccgtctatccgcgcttctttaatgtgggtacgcgcgtggcgattaaatgcaagaactccaaattttcggagaaagcctttctgattgaaccaattaaagcgaaggttgaactgacggagaacgatagccgtctgctcggaatctttagcgaatatgttacctggaaccgcgtctcgaacgtactgtcacatattggctcagtgacccagaaagattttggccgtgttgtggtcctgacgatgaaagacatcattcgcgaagcagcacgcgaaggccatgatctgttgttcgctgataacccgtcggcggtgctgaaggagctgacaggcctcatccagaacacgattcgctccaaatggcacgaagttctggag

SEQ ID NO: 2810 - protein, 346 aa, synthetic construct
  REGION 1..346: note = variant of RNA ligase 2 from Klebsiella phage KP179
MHHHHHHGGSNMFAYYSSLENHTNAKFLSKIRGAGFLSHTVEWVAREKIHGTNFSVIITPTEIVPAKRTGPILEDESFFGHEIIMKKYMDSFKKVQNMLNAMDLVSVQIFGEFAGGGIQKGFDYGDKDFYVFDILSDSGNEKSYWDDYRVESFCTTVGLKLAPLLGRGSFAELSQYPNDFKSLVNRYNELVDTVGLEMANKHVFGPQASSEEGYAEGYVLKPVYPRFFNVGTRVAIKCKNSKFSEKAFLIEPIKAKVELTENDSRLLGIFSEYVTWNRVSNVLSHIGSVTQKDFGRVVVLTMKDIIREAAREGHDLLFADNPSAVLKELTGLIQNTIRSKWHEVLE

SEQ ID NO: 2811 - DNA, 1038 bp, synthetic construct
  misc_feature 1..1038: note = variant of RNA ligase 2 from Klebsiella phage KP179
  source 1..1038: mol_type = other DNA
atgcatcaccatcaccatcacggtggcagcaacatgtttgcgtattattcaagtctggaaaaccataccaatgccaagttcattagcaagatccgtggtgcaggcttcctgagccacaccgtggaatgggtagctcgcgagaagattcatggaacgaactttagcgttatcattactccgaccgaaatcgtgccggccaaacgcacagggccgatcttggaagacgagagcttctttggtcatgaaattatcatgaaaaaatatatggactccttcaaaaaggttcagaacatgctaaatgcgatggatcttgttagcgtgcaaatctttggcgaatttgcgggtggtggcattcagaaaggctttgattacggagacaaagatttctatgtgtttgacatcctgtctgatagcgggaacgagaaaagctactgggatgactatcgcgtcgaatcgttttgcaccactgttggtctgaaattagcgcctctgctgggacgtggtagtttcgctgaactgtcccagtacccaaacgatttcaaaagcctggtgaaccgttataatgaattggttgatacggtcggcctggagatggccaataaacacgtctttggtccgcaagcgtcttctgaagaaggcctggcagaaggctacgttcttaaacccgtctatccgcgcttctttaatgtgggtacgcgcgtggcgattaaatgcaagaactccaaattttcggagaaagcctttctgattgaaccaattaaagcgaaggttgaactgacggagaacgatgaacgtctgctcggaatctttagcgaatatgttacctggaaccgcgtctcgaacgtactgtcacatattggctcagtgacccagaaagattttggccgtgttgtgggtctgacgatgaaagacatcattcgcgaagcagcacgcgaaggccatgatctgttgttcgctgataacccgtcggcggtgctgaaggagctggccggcctcatccagaacacgattcgctccaaatggcacgaagttctggag

SEQ ID NO: 2812 - protein, 346 aa, synthetic construct
  REGION 1..346: note = variant of RNA ligase 2 from Klebsiella phage KP179
MHHHHHHGGSNMFAYYSSLENHTNAKFISKIRGAGFLSHTVEWVAREKIHGTNFSVIITPTEIVPAKRTGPILEDESFFGHEIIMKKYMDSFKKVQNMLNAMDLVSVQIFGEFAGGGIQKGFDYGDKDFYVFDILSDSGNEKSYWDDYRVESFCTTVGLKLAPLLGRGSFAELSQYPNDFKSLVNRYNELVDTVGLEMANKHVFGPQASSEEGLAEGYVLKPVYPRFFNVGTRVAIKCKNSKFSEKAFLIEPIKAKVELTENDERLLGIFSEYVTWNRVSNVLSHIGSVTQKDFGRVVGLTMKDIIREAAREGHDLLFADNPSAVLKELAGLIQNTIRSKWHEVLE

SEQ ID NO: 2813 - DNA, 1038 bp, synthetic construct
  misc_feature 1..1038: note = variant of RNA ligase 2 from Klebsiella phage KP179
  source 1..1038: mol_type = other DNA
atgcatcaccatcaccatcacggtggcagcaacatgtttgcgtattattcaagtctggaaaaccataccaatgccaagttcgttagcaagatccgtggtgcaggcttcctgagccacaccgtggaatgggtagctcgcgagaagattcatggaacgaactttagcgttattattactccgaccgaaatcgtgccggccaaacgcacagggccgatcttggaagacgagagcttctttggtcatgaaattatcatgaaaaaatataacgactccttcaaaaaggttcagaacatgctgaatgcgatggatcttgttagcgtgcaaatctttggcgaatttgcgggtggtggcattcagaaaggctttgattacggagacaaagatttctatgtgtttgacatcctgtctgatagcgggaacgagaaaagctactgggatgactatcgcgtcgaatcgttttgcaccactgttggtctgaaattagcgcctctgctgggacgtggtagtttcgctgaactgtcccagtacccaaacgatttcaaaagcctggtgaaccgttataatgaattggttgatacggtcggcctggagatggccaataaacacgtctttggtccgcaagcgtcttctgaagaaggccaggcagaaggctacgttcttaaacccgtctatccgcgcttctttaatgtgggtacgcgcgtggcgattaaatgcaagaactccaaattttcggagaaagcctttctgattgaaccaattaaagcgaaggttgaactgacggagaacgataaacgtctgctcggaatctttagcgaatatgttacctggaaccgcgtctcgaacgtactgtcacatattggctcagtgaccagcaaagattttggccgtgttgtgggcctgacgatgaaagacatcattcgcgaagcagcacgcgaaggccatgatctgttgttcgctgataacccgtcggcggtgctgaaggagctgacaggcctcatccagaacacgattcgctccaaatggcacgaagttctggag

SEQ ID NO: 2814 - protein, 346 aa, synthetic construct
  REGION 1..346: note = variant of RNA ligase 2 from Klebsiella phage KP179
MHHHHHHGGSNMFAYYSSLENHTNAKFVSKIRGAGFLSHTVEWVAREKIHGTNFSVIITPTEIVPAKRTGPILEDESFFGHEIIMKKYNDSFKKVQNMLNAMDLVSVQIFGEFAGGGIQKGFDYGDKDFYVFDILSDSGNEKSYWDDYRVESFCTTVGLKLAPLLGRGSFAELSQYPNDFKSLVNRYNELVDTVGLEMANKHVFGPQASSEEGQAEGYVLKPVYPRFFNVGTRVAIKCKNSKFSEKAFLIEPIKAKVELTENDKRLLGIFSEYVTWNRVSNVLSHIGSVTSKDFGRVVGLTMKDIIREAAREGHDLLFADNPSAVLKELTGLIQNTIRSKWHEVLE

SEQ ID NO: 2815 - DNA, 1038 bp, synthetic construct
  misc_feature 1..1038: note = variant of RNA ligase 2 from Klebsiella phage KP179
  source 1..1038: mol_type = other DNA
atgcatcaccatcaccatcacggtggcagcaacatgtttgcgtattattcaagtctggaaaaccataccaatgccaagttcgttagcaagatccgtggtgcaggcttcctgagccacaccgtggaatgggtagctcgcgagaagattcatggaacgaactttagcgttatcattactccgaccgaaatcgtgccggccaaacgcacagggccgatcttggaagacgagagcttctttggtcatgaaattatcatgaaaaaatatatggactccttcaaaaaggttcagaacatgctgaatgcgatggatcttgttagcgtgcaaatctttggcgaatttgcgggtggtggcattcagaaaggctttgattacggagacaaagatttctatgtgtttgacatcctgtctgatagcgggaacgagaaaagctactgggatgactatcgcgtcgaatcgttttgcaccactgttggtctgaaattagcgcctctgctgggacgtggtagtttcgctgaactgtcccagtacccaaacgatttcaaaagcctggtgaaacgttataatgaattggttgatacggtcggcctggagatggccaataaacacgtctttggtccgcaagcgtcttctgaagaaggcctggcagaaggctacgttcttaaacccgtctatccgcgcttctttaatgtgggtacgcgcgtggcgattaaatgcaagaactccaaattttcggagaaagcctttctgattgaaccaattaaagcgaaggttgaactgacggagaacgataaacgtctgctcggaatctttggcgaatatgtgacctggaaccgcgtcagtaacgtactgtcacatattggctcagtgacccagaaagattttggccgtgttgtgggtctgacgatgaaagacatcattcgcgaagcacatcgcgaaggccatgatctgttgttcgctgataacccgtcggcggtgctgaaggagctgacaggcttgatccagaacacgattcgctccaaatggcacgaagttctggag

SEQ ID NO: 2816 - protein, 346 aa, synthetic construct
  REGION 1..346: note = variant of RNA ligase 2 from Klebsiella phage KP179
MHHHHHHGGSNMFAYYSSLENHTNAKFVSKIRGAGFLSHTVEWVAREKIHGTNFSVIITPTEIVPAKRTGPILEDESFFGHEIIMKKYMDSFKKVQNMLNAMDLVSVQIFGEFAGGGIQKGFDYGDKDFYVFDILSDSGNEKSYWDDYRVESFCTTVGLKLAPLLGRGSFAELSQYPNDFKSLVKRYNELVDTVGLEMANKHVFGPQASSEEGLAEGYVLKPVYPRFFNVGTRVAIKCKNSKFSEKAFLIEPIKAKVELTENDKRLLGIFGEYVTWNRVSNVLSHIGSVTQKDFGRVVGLTMKDIIREAHREGHDLLFADNPSAVLKELTGLIQNTIRSKWHEVLE

SEQ ID NO: 2817 - DNA, 1038 bp, synthetic construct
  misc_feature 1..1038: note = variant of RNA ligase 2 from Klebsiella phage KP179
  source 1..1038: mol_type = other DNA
atgcatcaccatcaccatcacggtggcagcaacatgtttgcgtattattcaagtctggaaaaccataccaatgccaagttcattagcaagatccgtggtgcaggcttcctgagccacaccgtggaatgggtagctcgcgagaagattcatggaacgaactttagcgttatcattactccgaccgaaatcgtgccggccaaacgcacagggccgatcttggaagacgagagcttctttggtcatgaaattatcatgaaaaaatatatggactccttcaaaaaggttcagaacatgctgaatgcgatggatcttgttagcgtgcaaatctttggcgaatttgcgggtggtggcattcagaaaggcaccgattacggagacaaagatttctatgtgtttgacatcctgtctgatagcgggaacgagaaaagctactgggatgactatcgcgtcgaatcgttttgcaccactgttggtctgaaattagcgcctctgctgggacgtggtagtttcgctgaactgtcccagtacccaaacgatttcaaaagcctggtgaaccgttataatgaattggttgatacggtcggcctggagatggccaataaacacgtctttggtccgcaagcgtcttctgaagaaggcctggcagaaggctacgttcttaaacccgtctatccgcgcttctttaatgtgggtacgcgcgtggcgattaaatgcaagaactccaaattttcggagaaagcctttctgattgaaccaattaaagcgaaggttgaactgacggagaacgataaacgtctgctcggaatctttggcgaatatgtgacctggaaccgcgtcagtaacgtactgtcacatattggctcagtgacccagaaagattttggccgtgttgtgggtctgacgatgaaagacatcattcgcgaagcagcgcgcgaaggccatgatctgttgttcgctgataacccgtcggcggtgctgaaggagctgacaggcttgatccagaacacgattcgctccaaatggcacgaagttctggag

SEQ ID NO: 2818 - protein, 346 aa, synthetic construct
  REGION 1..346: note = variant of RNA ligase 2 from Klebsiella phage KP179
MHHHHHHGGSNMFAYYSSLENHTNAKFISKIRGAGFLSHTVEWVAREKIHGTNFSVIITPTEIVPAKRTGPILEDESFFGHEIIMKKYMDSFKKVQNMLNAMDLVSVQIFGEFAGGGIQKGTDYGDKDFYVFDILSDSGNEKSYWDDYRVESFCTTVGLKLAPLLGRGSFAELSQYPNDFKSLVNRYNELVDTVGLEMANKHVFGPQASSEEGLAEGYVLKPVYPRFFNVGTRVAIKCKNSKFSEKAFLIEPIKAKVELTENDKRLLGIFGEYVTWNRVSNVLSHIGSVTQKDFGRVVGLTMKDIIREAAREGHDLLFADNPSAVLKELTGLIQNTIRSKWHEVLE

SEQ ID NO: 2819 - DNA, 1038 bp, synthetic construct
  misc_feature 1..1038: note = variant of RNA ligase 2 from Klebsiella phage KP179
  source 1..1038: mol_type = other DNA
atgcatcaccatcaccatcacggtggcagcaacatgtttgcgtattattcaagtctggaaaaccataccaatgccaagttcattagcaagatccgtggtgcaggcttcctgagccacaccgtggaatgggtagctcgcgagaagattcatggaacgaactttagcgttattattactccgaccgaaatcgtgccggccaaacgcacagggccgatcttggaagacgagagcttctttggtcatgaaattatcatgaaaaaatataacgactccttcaaaaaggttcagaacatgctgaatgcgatggatcttgttatggtgcaaatctttggcgaatttgcgggtggtggcattcagaaaggctttgattacggagacaaagatttctatgtgtttgacatcgtgtctgatagcgggaacgagaaaagctactgggatgactatcgcgtcgaatcgttttgcaccactgttggtctgaaattagcgcctctgctgggacgtggtagtttcgctgaactgtcccagtacccaaacgatttcaaaagcctggtgaaccgttataatgaattggttgatacggtcggcctggagatggccaataaacacgtctttggtccgcaagcgtcttctgaagaaggcctggcagaaggctacgttcttaaacccgtctatccgcgcttctttaatgtgggtacgcgcgtggcgattaaatgcaagaactccaaattttcggagaaagcctttctgattgaaccaattaaagcgaaggttgaactgacggagaacgatgaacgtctgctcggaatctttagcgaatatgttacctggaaccgcgtcttgaacgtactgtcacatattggctcagtgacccagaaagattttggccgtgttgtgggtctgacgatgaaagacatcattcgcgaagcagcacgcgaaggccatgatctgttgttcgctgataacccgtcggcggtgctgaaggagctggccggcctcatccagaacacgattcgctccaaatggcacgaagttctggag

SEQ ID NO: 2820 - protein, 346 aa, synthetic construct
  REGION 1..346: note = variant of RNA ligase 2 from Klebsiella phage KP179
MHHHHHHGGSNMFAYYSSLENHTNAKFISKIRGAGFLSHTVEWVAREKIHGTNFSVIITPTEIVPAKRTGPILEDESFFGHEIIMKKYNDSFKKVQNMLNAMDLVMVQIFGEFAGGGIQKGFDYGDKDFYVFDIVSDSGNEKSYWDDYRVESFCTTVGLKLAPLLGRGSFAELSQYPNDFKSLVNRYNELVDTVGLEMANKHVFGPQASSEEGLAEGYVLKPVYPRFFNVGTRVAIKCKNSKFSEKAFLIEPIKAKVELTENDERLLGIFSEYVTWNRVLNVLSHIGSVTQKDFGRVVGLTMKDIIREAAREGHDLLFADNPSAVLKELAGLIQNTIRSKWHEVLE

SEQ ID NO: 2821 - DNA, 1038 bp, synthetic construct
  misc_feature 1..1038: note = variant of RNA ligase 2 from Klebsiella phage KP179
  source 1..1038: mol_type = other DNA
atgcatcaccatcaccatcacggtggcagcaacatgtttgcgtattattcaagtctggaaaaccataccaatgccaagttcattagcaagatccgtggtgcaggcttcctgagccacaccgtggaatgggtagctcgcgagaagattcatggaacgaactttagcgttatcattactccgaccgaaatcgtgccggccaaacgcacagggccgatcttggaagacgagagcttctttggtcatgaaattatcatgaaaaaatatatggactccttcaaaaaggtgcagaacatgctgaatgcgatggatcttgttagcgtgcaaatctttggcgaatttgcgggtggtggcattcagaaaggctttgattacggagacaaagatttctatgtgtttgacatcctgtctgatagcgggaacgagaaaagctactgggatgactatcgcgtcgaatcgttttgcaccactgttggtctgaaattagcgcctctgctgggacgtggtagtttcgctgaactgtcccagtacccaaacgatttcaaaagcctggtgaaccgttataatgaattggttgatacggtcggcctggagatggccaataaacacgtctttggtccgcaaacgtcttctgaagaaggcctggcagaaggctacgttcttaaacccgtctatccgcgcttctttaatgtgggtacgcgcgtggcgattaaatgcaagaactccaaattttcggagaaagcctttctgattgaaccaattaaagcgaaggttgaactgacggagaacgataaacgtctgctcggaatctttagcgaatatgttacctggaaccgcgtcagtaacgtactgtcacatattggctcagtgaccgccaaagattttgtccgtgtttcgggtctgacgatgaaagacatcattcgcgaagcagcacgcgaaggccatgatctgttgttcgctgataacccgtcggcggtgctgaaggagctgacaggcctcatccagaacacgattcgctccaaatggcacgaagttctggag

SEQ ID NO: 2822 - protein, 346 aa, synthetic construct
  REGION 1..346: note = variant of RNA ligase 2 from Klebsiella phage KP179
MHHHHHHGGSNMFAYYSSLENHTNAKFISKIRGAGFLSHTVEWVAREKIHGTNFSVIITPTEIVPAKRTGPILEDESFFGHEIIMKKYMDSFKKVQNMLNAMDLVSVQIFGEFAGGGIQKGFDYGDKDFYVFDILSDSGNEKSYWDDYRVESFCTTVGLKLAPLLGRGSFAELSQYPNDFKSLVNRYNELVDTVGLEMANKHVFGPQTSSEEGLAEGYVLKPVYPRFFNVGTRVAIKCKNSKFSEKAFLIEPIKAKVELTENDKRLLGIFSEYVTWNRVSNVLSHIGSVTAKDFVRVSGLTMKDIIREAAREGHDLLFADNPSAVLKELTGLIQNTIRSKWHEVLE

SEQ ID NO: 2823 - DNA, 1038 bp, synthetic construct
  misc_feature 1..1038: note = variant of RNA ligase 2 from Klebsiella phage KP179
  source 1..1038: mol_type = other DNA
atgcatcaccatcaccatcacggtggcagcaacatgtttgcgtattattcaagtctggaaaaccataccaatgggaagttcattagcaagatccgtggtgcaggcttcctgagccacaccgtggaatgggtagctcgcgagaagattcatggaacgaactttagcgttatcattactccgaccgaaatcgtgccggccaaacgcacagggccgatcttggaagacgagagcttctttggtcatgaaattatcatgaaaaaatatatggactccttcaaaaaggtgcagaacatgctgaatgcgatggatcttgttagcgtgcaaatctttggcgaatttgcgggtggtggcattcagaaaggctttgattacggagacaaagatttctatgtgtttgacatcctgtctgatagcgggaacgagaaaagctactgggatgactatcgcgtcgaatcgttttgcaccactgttggtctgaaattagcgcctctgctgggacgtggtagtttcgctgaactgtcccagtacccaaacgatttcaaaagcctggtgaaccgttataatgaattggttgatacggtcggcctggagatggccaataaacacgtctttggtccgcaagcgtcttctgaagaaggcctggcagaaggctacgttcttaaacccgtctatccgcgcttctttaatgtgggtacgcgcgtggcgattaaatgcaagaactccaaattttcggagaaagcctttctgattgaaccaattaaagcgaaggttgaactgacggagaacgataaacgtctgctcggaatctttagcgaatatgttacctggaaccgcgtcagtaacgtactgtcacatattggctcagtgaccgccaaagattttgtccgtgtttcgggtctgacgatgaaagacatcattcgcgaagcagcacgcgaaggccatgatctgttgttcgctgataacccgtcggcggtgctgaaggagctgacaggcctcatccagaacacgattcgctccaaatggcacgaagttctggag

SEQ ID NO: 2824 - protein, 346 aa, synthetic construct
  REGION 1..346: note = variant of RNA ligase 2 from Klebsiella phage KP179
MHHHHHHGGSNMFAYYSSLENHTNGKFISKIRGAGFLSHTVEWVAREKIHGTNFSVIITPTEIVPAKRTGPILEDESFFGHEIIMKKYMDSFKKVQNMLNAMDLVSVQIFGEFAGGGIQKGFDYGDKDFYVFDILSDSGNEKSYWDDYRVESFCTTVGLKLAPLLGRGSFAELSQYPNDFKSLVNRYNELVDTVGLEMANKHVFGPQASSEEGLAEGYVLKPVYPRFFNVGTRVAIKCKNSKFSEKAFLIEPIKAKVELTENDKRLLGIFSEYVTWNRVSNVLSHIGSVTAKDFVRVSGLTMKDIIREAAREGHDLLFADNPSAVLKELTGLIQNTIRSKWHEVLE

SEQ ID NO: 2825 - DNA, 1038 bp, synthetic construct
  misc_feature 1..1038: note = variant of RNA ligase 2 from Klebsiella phage KP179
  source 1..1038: mol_type = other DNA
atgcatcaccatcaccatcacggtggcagcaacatgtttgcgtattattcaagtctggaaaaccataccaatgccaagttcattagcaagatccgtggtgcaggcttcctgagccacaccgtggaatgggtagctcgcgagaagattcatggaacgaactttagcgttatcattactccgaccgaaatcgtgccggccaaacgcacagggccgatcttggaagacgagagcttctttggtcatgaaattatcatgaaaaaatatatggagtccttcaaaaaggtgcagaacatgctgaatgcgatggatcttgttagcgtgcaaatctttggcgaatttgcgggtggtggcattcagaaaggctttgattacggagacaaagatttctatgtgtttgacatcctgtctgatagcgggaacgagaaaagctactgggatgactatcgcgtcgaatcgttttgcaccactgttggtctgaaattagcgcctctgctgggacgtggtagtttcgctgaactgtcccagtacccaaacgatttcaaaagcctggtgaaccgttataatgaattggttgatacggtcggcctggagatggccaataaacacgtctttggtccgcaagcgtcttctgaagaaggcctggcagaaggctacgttcttaaacccgtctatccgcgcttctttaatgtgggtacgcgcgtggcgattaaatgcaagaactccaaattttcggagaaagcctttctgattgaaccaattaaagcgaaggttgaactgacggagaacgataaacgtctgctcggaatctttagcgaatatgttacctggaaccgcgtcagtaacgtactgtcacatattggctcagtgaccgccaaagattttgtccgtgtttcgggtctgacgatgaaagacatcattcgcgaagcagcacgcgaaggccatgatctgttgttcgctgataacccgtcggcggtgctgaaggagctgacaggcctcatccagaacacgattcgctccaaatggcacgaagttctggag

SEQ ID NO: 2826 - protein, 346 aa, synthetic construct
  REGION 1..346: note = variant of RNA ligase 2 from Klebsiella phage KP179
MHHHHHHGGSNMFAYYSSLENHTNAKFISKIRGAGFLSHTVEWVAREKIHGTNFSVIITPTEIVPAKRTGPILEDESFFGHEIIMKKYMESFKKVQNMLNAMDLVSVQIFGEFAGGGIQKGFDYGDKDFYVFDILSDSGNEKSYWDDYRVESFCTTVGLKLAPLLGRGSFAELSQYPNDFKSLVNRYNELVDTVGLEMANKHVFGPQASSEEGLAEGYVLKPVYPRFFNVGTRVAIKCKNSKFSEKAFLIEPIKAKVELTENDKRLLGIFSEYVTWNRVSNVLSHIGSVTAKDFVRVSGLTMKDIIREAAREGHDLLFADNPSAVLKELTGLIQNTIRSKWHEVLE

SEQ ID NO: 2827 - DNA, 1038 bp, synthetic construct
  misc_feature 1..1038: note = variant of RNA ligase 2 from Klebsiella phage KP179
  source 1..1038: mol_type = other DNA
atgcatcaccatcaccatcacggtggcagcaacatgtttgcgtattattcaagtctggaaaaccataccaatgccaagttcattagcaagatccgtggtgcaggcttcctgagccacaccgtggaatgggtagctcgcgagaagattcatggaacgaactttagcgttatcattactccgaccgaaatcgtgccggccaaacgcacagggccgatcttggaagacgagagcttctttggtcatgaaattatcatgaaaaaatatatggactccttcaaaaaggtgcagaacatgctgaatgcgatggatcttgttagcgtgcaaatctttggcgaatttgcgggtggtggcattcagaaaggctttgattacggagacaaagatttctatgtgtttgacatcctgtctgatagcgggaacgataaaagctactgggatgactatcgcgtcgaatcgttttgcaccactgttggtctgaaattagcgcctctgctgggacgtggtagtttcgctgaactgtcccagtacccaaacgatttcaaaagcctggtgaaccgttataatgaattggttgatacggtcggcctggagatggccaataaacacgtctttggtccgcaagcgtcttctgaagaaggcctggcagaaggctacgttcttaaacccgtctatccgcgcttctttaatgtgggtacgcgcgtggcgattaaatgcaagaactccaaattttcggagaaagcctttctgattgaaccaattaaagcgaaggttgaactgacggagaacgataaacgtctgctcggaatctttagcgaatatgttacctggaaccgcgtcagtaacgtactgtcacatattggctcagtgaccgccaaagattttgtccgtgtttcgggtctgacgatgaaagacatcattcgcgaagcagcacgcgaaggccatgatctgttgttcgctgataacccgtcggcggtgctgaaggagctgacaggcctcatccagaacacgattcgctccaaatggcacgaagttctggag

SEQ ID NO: 2828 - protein, 346 aa, synthetic construct
  REGION 1..346: note = variant of RNA ligase 2 from Klebsiella phage KP179
MHHHHHHGGSNMFAYYSSLENHTNAKFISKIRGAGFLSHTVEWVAREKIHGTNFSVIITPTEIVPAKRTGPILEDESFFGHEIIMKKYMDSFKKVQNMLNAMDLVSVQIFGEFAGGGIQKGFDYGDKDFYVFDILSDSGNDKSYWDDYRVESFCTTVGLKLAPLLGRGSFAELSQYPNDFKSLVNRYNELVDTVGLEMANKHVFGPQASSEEGLAEGYVLKPVYPRFFNVGTRVAIKCKNSKFSEKAFLIEPIKAKVELTENDKRLLGIFSEYVTWNRVSNVLSHIGSVTAKDFVRVSGLTMKDIIREAAREGHDLLFADNPSAVLKELTGLIQNTIRSKWHEVLE

SEQ ID NO: 2829 - DNA, 1038 bp, synthetic construct
  misc_feature 1..1038: note = variant of RNA ligase 2 from Klebsiella phage KP179
  source 1..1038: mol_type = other DNA
atgcatcaccatcaccatcacggtggcagcaacatgtttgcgtattattcaagtctggaaaaccataccaatgccaagttcattagcaagatccgtggtgcaggcttcctgagccacaccgtggaatgggtagctcgcgagaagattcatggaacgaactttagcgttatcattactccgaccgaaatcgtgccggccaaacgcacagggccgatcttggaagacgagagcttctttggtcatgaaattatcatgaaaaaatatatggactccttcaaaaaggtgcagaacatgctgaatgcgatggatcttgttagcgtgcaaatctttggcgaatttgcgggtggtggcattcagaaaggctttgattacggagacaaagatttctatgtgtttgacatcctgtctgatagcgggaacgagaaaagctactgggatgactatcgcgtcgaatcgttttgcaccactgttggtctgaaattagcgcctctgctgggacgtggtagtttcgctgaactgtcccagtacccaaacgatttcaaaagcctggtgaaccgttataatgaattggttgatacggtcggcctggagatggccaataaacacgtctttggtccgcaagcgtcttctgaagaaggcctggcagaaggctacgttcttaaacccgtctatccgcgcttctttaatgtgggtacgcgcgtggcgattaaatgcaagaactccaaattttcggagaaagcctttctgattgaaccaattaaagcgaaggttgatctgacggagaacgataaacgtctgctcggaatctttagcgaatatgttacctggaaccgcgtcagtaacgtactgtcacatattggctcagtgaccgccaaagattttgtccgtgtttcgggtctgacgatgaaagacatcattcgcgaagcagcacgcgaaggccatgatctgttgttcgctgataacccgtcggcggtgctgaaggagctgacaggcctcatccagaacacgattcgctccaaatggcacgaagttctggag

SEQ ID NO: 2830 - protein, 346 aa, synthetic construct
  REGION 1..346: note = variant of RNA ligase 2 from Klebsiella phage KP179
MHHHHHHGGSNMFAYYSSLENHTNAKFISKIRGAGFLSHTVEWVAREKIHGTNFSVIITPTEIVPAKRTGPILEDESFFGHEIIMKKYMDSFKKVQNMLNAMDLVSVQIFGEFAGGGIQKGFDYGDKDFYVFDILSDSGNEKSYWDDYRVESFCTTVGLKLAPLLGRGSFAELSQYPNDFKSLVNRYNELVDTVGLEMANKHVFGPQASSEEGLAEGYVLKPVYPRFFNVGTRVAIKCKNSKFSEKAFLIEPIKAKVDLTENDKRLLGIFSEYVTWNRVSNVLSHIGSVTAKDFVRVSGLTMKDIIREAAREGHDLLFADNPSAVLKELTGLIQNTIRSKWHEVLE

SEQ ID NO: 2831 - DNA, 1038 bp, synthetic construct
  misc_feature 1..1038: note = variant of RNA ligase 2 from Klebsiella phage KP179
  source 1..1038: mol_type = other DNA
atgcatcaccatcaccatcacggtggcagcaacatgtttgcgtattattcaagtctggaaaaccataccaatgccaagttcattagcaagatccgtggtgcaggcttcctgagccacaccgtggaatgggtagctcgcgagaagattcatggaacgaactttagcgttatcattactccgaccgaaatcgtgccggccaaacgcacagggccgatcttggaagacgagagcttctttggtcatgaaattatcatgaaaaaatatatggactccttcaaaaaggtgcagaacatgctgaatgcgatggatcttgttagcgtgcaaatctttggcgaatttgcgggtggtggcattcagaaaggctttgattacggagacaaagatttctatgtgtttgacatcctgtctgatagcgggaacgagaaaagctactgggatgactatcgcgtcgaatcgttttgcaccactgttggtctgaaattagcgcctctgctgggacgtggtagtttcgctgaactgtcccagtacccaaacgatttcaaaagcctggtgaaccgttataatgaattggttgatacggtcggcctggagatggccaataaacacgtctttggtccgcaagcgtcttctgaagaaggcctggcagaaggctacgttcttaaacccgtctatccgcgcttctttaatgtgggtacgcgcgtggcgattaaatgcaagaactccaaattttcggagaaagccgggctgattgaaccaattaaagcgaaggttgaactgacggagaacgataaacgtctgctcggaatctttagcgaatatgttacctggaaccgcgtcagtaacgtactgtcacatattggctcagtgaccgccaaagattttgtccgtgtttcgggtctgacgatgaaagacatcattcgcgaagcagcacgcgaaggccatgatctgttgttcgctgataacccgtcggcggtgctgaaggagctgacaggcctcatccagaacacgattcgctccaaatggcacgaagttctggag

SEQ ID NO: 2832 - protein, 346 aa, synthetic construct
  REGION 1..346: note = variant of RNA ligase 2 from Klebsiella phage KP179
MHHHHHHGGSNMFAYYSSLENHTNAKFISKIRGAGFLSHTVEWVAREKIHGTNFSVIITPTEIVPAKRTGPILEDESFFGHEIIMKKYMDSFKKVQNMLNAMDLVSVQIFGEFAGGGIQKGFDYGDKDFYVFDILSDSGNEKSYWDDYRVESFCTTVGLKLAPLLGRGSFAELSQYPNDFKSLVNRYNELVDTVGLEMANKHVFGPQASSEEGLAEGYVLKPVYPRFFNVGTRVAIKCKNSKFSEKAGLIEPIKAKVELTENDKRLLGIFSEYVTWNRVSNVLSHIGSVTAKDFVRVSGLTMKDIIREAAREGHDLLFADNPSAVLKELTGLIQNTIRSKWHEVLE

SEQ ID NO: 2833 - DNA, 1038 bp, synthetic construct
  misc_feature 1..1038: note = variant of RNA ligase 2 from Klebsiella phage KP179
  source 1..1038: mol_type = other DNA
atgcatcaccatcaccatcacggtggcagcaacatgtttgcgtattattcaagtctggaaaaccataccaatgccaagttcattagcaagatccgtggtgcaggcttcctgagccacaccgtggaatgggtagctcgcgagaagattcatggaacgaactttagcgttatcattactccgaccgaaatcgtgccggccaaacgcacagggccgatcttggaagacgagagcttctttggtcatgaaattatcatgaaaaaatatatggactccttcaaaaaggtgcagaacatgctgaatgcgatggatcttgttagcgtgcaaatctttggcgaatttgcgggtggtggcattcagaaaggctttgattacggagacaaagatttctatgtgtttgacatcctgtctgatagcgggaacgagaaaagctactgggatgactatcgcgtcgaatcgttttgcaccactgttggtctgaaattagcgcctctgctgggacgtggtagtttcgctgaactgtcccagtacccaaacgatttcaaaagcctggtgaaccgttataatgaattggttgatacggtcggcctggagatggccaataaacacgtctttggtccgcaagcgtcttctgaagaaggcctggcagaaggctacgttcttaaacccgtctatccgcgcttctttaatgtgggtacgcgcgtggcgattaaatgcaagaactccaaattttcggagaaagccaagctgattgaaccaattaaagcgaaggttgaactgacggagaacgataaacgtctgctcggaatctttagcgaatatgttacctggaaccgcgtcagtaacgtactgtcacatattggctcagtgaccgccaaagattttgtccgtgtttcgggtctgacgatgaaagacatcattcgcgaagcagcacgcgaaggccatgatctgttgttcgctgataacccgtcggcggtgctgaaggagctgacaggcctcatccagaacacgattcgctccaaatggcacgaagttctggag

SEQ ID NO: 2834 - protein, 346 aa, synthetic construct
  REGION 1..346: note = variant of RNA ligase 2 from Klebsiella phage KP179
MHHHHHHGGSNMFAYYSSLENHTNAKFISKIRGAGFLSHTVEWVAREKIHGTNFSVIITPTEIVPAKRTGPILEDESFFGHEIIMKKYMDSFKKVQNMLNAMDLVSVQIFGEFAGGGIQKGFDYGDKDFYVFDILSDSGNEKSYWDDYRVESFCTTVGLKLAPLLGRGSFAELSQYPNDFKSLVNRYNELVDTVGLEMANKHVFGPQASSEEGLAEGYVLKPVYPRFFNVGTRVAIKCKNSKFSEKAKLIEPIKAKVELTENDKRLLGIFSEYVTWNRVSNVLSHIGSVTAKDFVRVSGLTMKDIIREAAREGHDLLFADNPSAVLKELTGLIQNTIRSKWHEVLE

SEQ ID NO: 2835 - DNA, 1038 bp, synthetic construct
  misc_feature 1..1038: note = variant of RNA ligase 2 from Klebsiella phage KP179
  source 1..1038: mol_type = other DNA
atgcatcaccatcaccatcacggtggcagcaacatgtttgcgtattattcaagtctggaaaaccataccaatgccaagttcattagcaagatccgtggtgcaggcttcctgagccacaccgtggaatgggtagctcgcgagaagattcatggaacgaactttagcgttatcattactccgaccgaaatcgtgccggccaaacgcacagggccgatcttggaagacgagagcttctttggtcatgaaattatcatgaaaaaatatatggactccttcaaaaaggtgcagaacatgctgaatgcgatggatcttgttagcgtgcaaatctttggcgaatttgcgggtggtggcattcagaaaggctttgattacggagacaaagatttctatgtgtttgacatcctgtctgatagcgggaacgagaaaagctactgggatgactatcgcgtcgaatcgttttgcaccactgttggtctgaaattagcgcctctgctgggacgtggtagtttcgctgaactgtcccagtacccaaacgatttcaaaagcctggtgaaccgttataatgaattggttgatacggtcggcctggagatggccaataaacacgtctttggtccgcaagcgtcttctgaagaaggcctggcagaaggctacgttcttaaacccgtctatccgcgcttctttaatgtgggtacgcgcgtggcgattaaatgcaagaactccaaattttcggagaaagcctttctgattgaaccaattaaagcgaaggttgaactgacggagaacgataaacgtctgctcggaatctttagcgaatatgttacctggaaccgcgtcagtaacgtactgtcacatattggctcagtgaccgccaaagattttgtccgtgtttcgggtctgacgatgaaagacatcattcgcgaagcagcacgcgaaggccatgatctgttggaggctgataacccgtcggcggtgctgaaggagctgacaggcctcatccagaacacgattcgctccaaatggcacgaagttctggag

SEQ ID NO: 2836 - protein, 346 aa, synthetic construct
  REGION 1..346: note = variant of RNA ligase 2 from Klebsiella phage KP179
MHHHHHHGGSNMFAYYSSLENHTNAKFISKIRGAGFLSHTVEWVAREKIHGTNFSVIITPTEIVPAKRTGPILEDESFFGHEIIMKKYMDSFKKVQNMLNAMDLVSVQIFGEFAGGGIQKGFDYGDKDFYVFDILSDSGNEKSYWDDYRVESFCTTVGLKLAPLLGRGSFAELSQYPNDFKSLVNRYNELVDTVGLEMANKHVFGPQASSEEGLAEGYVLKPVYPRFFNVGTRVAIKCKNSKFSEKAFLIEPIKAKVELTENDKRLLGIFSEYVTWNRVSNVLSHIGSVTAKDFVRVSGLTMKDIIREAAREGHDLLEADNPSAVLKELTGLIQNTIRSKWHEVLE

SEQ ID NO: 2837 - DNA, 1038 bp, synthetic construct
  misc_feature 1..1038: note = variant of RNA ligase 2 from Klebsiella phage KP179
  source 1..1038: mol_type = other DNA
atgcatcaccatcaccatcacggtggcagcaacatgtttgcgtattattcaagtctggaaaaccataccaatgccaagttcattagcaagatccgtggtgcaggcttcctgagccacaccgtggaatgggtagctcgcgagaagattcatggaacgaactttagcgttatcattactccgaccgaaatcgtgccggccaaacgcacagggccgatcttggaagacgagagcttctttggtcatgaaattatcatgaaaaaatatatggactccttcaaaaaggtgcagaacatgctgaatgcgatggatcttgttagcgtgcaaatctttggcgaatttgcgggtggtggcattcagaaaggctttgattacggagacaaagatttctatgtgtttgacatcctgtctgatagcgggaacgagaaaagctactgggatgactatcgcgtcgaatcgttttgcaccactgttggtctgaaattagcgcctctgctgggacgtggtagtttcgctgaactgtcccagtacccaaacgatttcaaaagcctggtgaaccgttataatgaattggttgatacggtcggcctggagatggccaataaacacgtctttggtccgcaagcgtcttctgaagaaggcctggcagaaggctacgttcttaaacccgtctatccgcgcttctttaatgtgggtacgcgcgtggcgattaaatgcaagaactccaaattttcggagaaagcctttctgattgaaccaattaaagcgaaggttgaactgacggagaacgataaacgtctgctcggaatctttagcgaatatgttacctggaaccgcgtcagtaacgtactgtcacatattggctcagtgaccgccaaagattttgtccgtgtttcgggtctgacgatgaaagacatcattcgcgaagcagcacgcgaaggccatgatctgttgagtgctgataacccgtcggcggtgctgaaggagctgacaggcctcatccagaacacgattcgctccaaatggcacgaagttctggag

SEQ ID NO: 2838 - protein, 346 aa, synthetic construct
  REGION 1..346: note = variant of RNA ligase 2 from Klebsiella phage KP179
MHHHHHHGGSNMFAYYSSLENHTNAKFISKIRGAGFLSHTVEWVAREKIHGTNFSVIITPTEIVPAKRTGPILEDESFFGHEIIMKKYMDSFKKVQNMLNAMDLVSVQIFGEFAGGGIQKGFDYGDKDFYVFDILSDSGNEKSYWDDYRVESFCTTVGLKLAPLLGRGSFAELSQYPNDFKSLVNRYNELVDTVGLEMANKHVFGPQASSEEGLAEGYVLKPVYPRFFNVGTRVAIKCKNSKFSEKAFLIEPIKAKVELTENDKRLLGIFSEYVTWNRVSNVLSHIGSVTAKDFVRVSGLTMKDIIREAAREGHDLLSADNPSAVLKELTGLIQNTIRSKWHEVLE

SEQ ID NO: 2839 - DNA, 1038 bp, synthetic construct
  misc_feature 1..1038: note = variant of RNA ligase 2 from Klebsiella phage KP179
  source 1..1038: mol_type = other DNA
atgcatcaccatcaccatcacggtggcagcaacatgtttgcgtattattcaagtctggaaaaccataccaatgccaagttcattagcaagatccgtggtgcaggcttcctgagccacaccgtggaatgggtagctcgcgagaagattcatggaacgaactttagcgttatcattactccgaccgaaatcgtgccggccaaacgcacagggccgatcttggaagacgagagcttctttggtcatgaaattatcatgaaaaaatatatggactccttcaaaaaggtgcagaacatgctgaatgcgatggatcttgttagcgtgcaaatctttggcgaatttgcgggtggtcagattcagaaaggctttgattacggagacaaagatttctatgtgtttgacatcctgtctgatagcgggaacgagaaaagctactgggatgactatcgcgtcgaatcgttttgcaccactgttggtctgaaattagcgcctctgctgggacgtggtagtttcgctgaactgtcccagtacccaaacgatttcaaaagcctggtgaaccgttataatgaattggttgatacggtcggcctggagatggccaataaacacgtctttggtccgcaagcgtcttctgaagaaggcctggcagaaggctacgttcttaaacccgtctatccgcgcttctttaatgtgggtacgcgcgtggcgattaaatgcaagaactccaaattttcggagaaagcctttctgattgaaccaattaaagcgaaggttgaactgacggagaacgataaacgtctgctcggaatctttagcgaatatgttacctggaaccgcgtcagtaacgtactgtcacatattggctcagtgaccgccaaagattttgtccgtgtttcgggtctgacgatgaaagacatcattcgcgaagcagcacgcgaaggccatgatctgttgttcgctgataacccgtcggcggtgctgaaggagctgacaggcctcatccagaacacgattcgctccaaatggcacgaagttctggag

SEQ ID NO: 2840 - protein, 346 aa, synthetic construct
  REGION 1..346: note = variant of RNA ligase 2 from Klebsiella phage KP179
MHHHHHHGGSNMFAYYSSLENHTNAKFISKIRGAGFLSHTVEWVAREKIHGTNFSVIITPTEIVPAKRTGPILEDESFFGHEIIMKKYMDSFKKVQNMLNAMDLVSVQIFGEFAGGQIQKGFDYGDKDFYVFDILSDSGNEKSYWDDYRVESFCTTVGLKLAPLLGRGSFAELSQYPNDFKSLVNRYNELVDTVGLEMANKHVFGPQASSEEGLAEGYVLKPVYPRFFNVGTRVAIKCKNSKFSEKAFLIEPIKAKVELTENDKRLLGIFSEYVTWNRVSNVLSHIGSVTAKDFVRVSGLTMKDIIREAAREGHDLLFADNPSAVLKELTGLIQNTIRSKWHEVLE

SEQ ID NO: 2841 - DNA, 1038 bp, synthetic construct
  misc_feature 1..1038: note = variant of RNA ligase 2 from Klebsiella phage KP179
  source 1..1038: mol_type = other DNA
atgcatcaccatcaccatcacggtggcagcaacatgtttgcgtattattcaagtctggaaaaccataccaatgccaagttcattagcaagatccgtggtgcaggcttcctgagccacaccgtggaatgggtagctcgcgagaagattcatggaacgaactttagcgttatcattactccgaccgaaatcgtgccggccaaacgcacagggccgatcttggaagacgagagcttctttggtcatgaaattatcatgaaaaaatatatggactccttcaaaaaggtgcagaacatgctgaatgcgatggatcttgttagcgtgcaaatctttggcgaatttgcgggtggtggcattcagaaaggctttgattacggagacaaagatttctatgtgtttgacatcctgtctgatagcgggaacgagaaaagctactgggatgactatcgcgtcgaatcgttttgcaccactgttggtctgaaattagcgcctctgctgggacgtggtagtttcgctgaactgtcccagtacccaaacgatttcaaaagcctggtgaaccgttataatgaattggttgatacggtcggcctggagatggccaataaacacgtctttggtccgcaagcgtcttctgaagaaggcctggcagaaggctacgttcttaaacccgtctatccgcgcttctttaatgtgggtacgcgcgtggcgattaaatgcaagaactccaaattttcggagaaagcctttctgattgaaccaattaaagcgaaggttgaactgacggagaacgataaacgtctgctcggaatctttagcgaatatgttacctggaaccgcgtcagtaacgtactgtcacatattggctcagtgaccgccaaagattttgtccgtgtttcgaagctgacgatgaaagacatcattcgcgaagcagcacgcgaaggccatgatctgttgttcgctgataacccgtcggcggtgctgaaggagctgacaggcctcatccagaacacgattcgctccaaatggcacgaagttctggag

SEQ ID NO: 2842 - protein, 346 aa, synthetic construct
  REGION 1..346: note = variant of RNA ligase 2 from Klebsiella phage KP179
MHHHHHHGGSNMFAYYSSLENHTNAKFISKIRGAGFLSHTVEWVAREKIHGTNFSVIITPTEIVPAKRTGPILEDESFFGHEIIMKKYMDSFKKVQNMLNAMDLVSVQIFGEFAGGGIQKGFDYGDKDFYVFDILSDSGNEKSYWDDYRVESFCTTVGLKLAPLLGRGSFAELSQYPNDFKSLVNRYNELVDTVGLEMANKHVFGPQASSEEGLAEGYVLKPVYPRFFNVGTRVAIKCKNSKFSEKAFLIEPIKAKVELTENDKRLLGIFSEYVTWNRVSNVLSHIGSVTAKDFVRVSKLTMKDIIREAAREGHDLLFADNPSAVLKELTGLIQNTIRSKWHEVLE

SEQ ID NO: 2843 - DNA, 1038 bp, synthetic construct
  misc_feature 1..1038: note = variant of RNA ligase 2 from Klebsiella phage KP179
  source 1..1038: mol_type = other DNA
atgcatcaccatcaccatcacggtggcagcaacatgtttgcgtattattcaagtctggaaaaccataccaatgccaagttcattagcaagatccgtattgcaggcttcctgagccacaccgtggaatgggtagctcgcgagaagattcatggaacgaactttagcgttatcattactccgaccgaaatcgtgccggccaaacgcacagggccgatcttggaagacgagagcttctttggtcatgaaattatcatgaaaaaatatatggactccttcaaaaaggtgcagaacatgctgaatgcgatggatcttgttagcgtgcaaatctttggcgaatttgcgggtggtggcattcagaaaggctttgattacggagacaaagatttctatgtgtttgacatcctgtctgatagcgggaacgagaaaagctactgggatgactatcgcgtcgaatcgttttgcaccactgttggtctgaaattagcgcctctgctgggacgtggtagtttcgctgaactgtcccagtacccaaacgatttcaaaagcctggtgaaccgttataatgaattggttgatacggtcggcctggagatggccaataaacacgtctttggtccgcaagcgtcttctgaagaaggcctggcagaaggctacgttcttaaacccgtctatccgcgcttctttaatgtgggtacgcgcgtggcgattaaatgcaagaactccaaattttcggagaaagcctttctgattgaaccaattaaagcgaaggttgaactgacggagaacgataaacgtctgctcggaatctttagcgaatatgttacctggaaccgcgtcagtaacgtactgtcacatattggctcagtgaccgccaaagattttgtccgtgtttcgggtctgacgatgaaagacatcattcgcgaagcagcacgcgaaggccatgatctgttgttcgctgataacccgtcggcggtgctgaaggagctgacaggcctcatccagaacacgattcgctccaaatggcacgaagttctggag

SEQ ID NO: 2844 - protein, 346 aa, synthetic construct
  REGION 1..346: note = variant of RNA ligase 2 from Klebsiella phage KP179
MHHHHHHGGSNMFAYYSSLENHTNAKFISKIRIAGFLSHTVEWVAREKIHGTNFSVIITPTEIVPAKRTGPILEDESFFGHEIIMKKYMDSFKKVQNMLNAMDLVSVQIFGEFAGGGIQKGFDYGDKDFYVFDILSDSGNEKSYWDDYRVESFCTTVGLKLAPLLGRGSFAELSQYPNDFKSLVNRYNELVDTVGLEMANKHVFGPQASSEEGLAEGYVLKPVYPRFFNVGTRVAIKCKNSKFSEKAFLIEPIKAKVELTENDKRLLGIFSEYVTWNRVSNVLSHIGSVTAKDFVRVSGLTMKDIIREAAREGHDLLFADNPSAVLKELTGLIQNTIRSKWHEVLE

SEQ ID NO: 2845 - DNA, 1038 bp, synthetic construct
  misc_feature 1..1038: note = variant of RNA ligase 2 from Klebsiella phage KP179
  source 1..1038: mol_type = other DNA
atgcatcaccatcaccatcacggtggcagcaacatgtttgcgtattattcaagtctggaaaaccataccaatgccaagttcattagcaagatccgtacggcaggcttcctgagccacaccgtggaatgggtagctcgcgagaagattcatggaacgaactttagcgttatcattactccgaccgaaatcgtgccggccaaacgcacagggccgatcttggaagacgagagcttctttggtcatgaaattatcatgaaaaaatatatggactccttcaaaaaggtgcagaacatgctgaatgcgatggatcttgttagcgtgcaaatctttggcgaatttgcgggtggtggcattcagaaaggctttgattacggagacaaagatttctatgtgtttgacatcctgtctgatagcgggaacgagaaaagctactgggatgactatcgcgtcgaatcgttttgcaccactgttggtctgaaattagcgcctctgctgggacgtggtagtttcgctgaactgtcccagtacccaaacgatttcaaaagcctggtgaaccgttataatgaattggttgatacggtcggcctggagatggccaataaacacgtctttggtccgcaagcgtcttctgaagaaggcctggcagaaggctacgttcttaaacccgtctatccgcgcttctttaatgtgggtacgcgcgtggcgattaaatgcaagaactccaaattttcggagaaagcctttctgattgaaccaattaaagcgaaggttgaactgacggagaacgataaacgtctgctcggaatctttagcgaatatgttacctggaaccgcgtcagtaacgtactgtcacatattggctcagtgaccgccaaagattttgtccgtgtttcgggtctgacgatgaaagacatcattcgcgaagcagcacgcgaaggccatgatctgttgttcgctgataacccgtcggcggtgctgaaggagctgacaggcctcatccagaacacgattcgctccaaatggcacgaagttctggag

SEQ ID NO: 2846 - protein, 346 aa, synthetic construct
  REGION 1..346: note = variant of RNA ligase 2 from Klebsiella phage KP179
MHHHHHHGGSNMFAYYSSLENHTNAKFISKIRTAGFLSHTVEWVAREKIHGTNFSVIITPTEIVPAKRTGPILEDESFFGHEIIMKKYMDSFKKVQNMLNAMDLVSVQIFGEFAGGGIQKGFDYGDKDFYVFDILSDSGNEKSYWDDYRVESFCTTVGLKLAPLLGRGSFAELSQYPNDFKSLVNRYNELVDTVGLEMANKHVFGPQASSEEGLAEGYVLKPVYPRFFNVGTRVAIKCKNSKFSEKAFLIEPIKAKVELTENDKRLLGIFSEYVTWNRVSNVLSHIGSVTAKDFVRVSGLTMKDIIREAAREGHDLLFADNPSAVLKELTGLIQNTIRSKWHEVLE

SEQ ID NO: 2847 - DNA, 1038 bp, synthetic construct
  misc_feature 1..1038: note = variant of RNA ligase 2 from Klebsiella phage KP179
  source 1..1038: mol_type = other DNA
atgcatcaccatcaccatcacggtggcagcaacatgtttgcgtattattcaagtctggaaaaccataccaatgccaagttcattagcaagatccgtggtgcaggcttcctgagccacaccgtggaatgggtagctcgcgagaagattcatggaacgaactttagcgttatcattactccgaccgaaatcgtgccggccaaacgcacagggccgatcttggaagacgagagcttctttgagcatgaaattatcatgaaaaaatatatggactccttcaaaaaggtgcagaacatgctgaatgcgatggatcttgttagcgtgcaaatctttggcgaatttgcgggtggtggcattcagaaaggctttgattacggagacaaagatttctatgtgtttgacatcctgtctgatagcgggaacgagaaaagctactgggatgactatcgcgtcgaatcgttttgcaccactgttggtctgaaattagcgcctctgctgggacgtggtagtttcgctgaactgtcccagtacccaaacgatttcaaaagcctggtgaaccgttataatgaattggttgatacggtcggcctggagatggccaataaacacgtctttggtccgcaagcgtcttctgaagaaggcctggcagaaggctacgttcttaaacccgtctatccgcgcttctttaatgtgggtacgcgcgtggcgattaaatgcaagaactccaaattttcggagaaagcctttctgattgaaccaattaaagcgaaggttgaactgacggagaacgataaacgtctgctcggaatctttagcgaatatgttacctggaaccgcgtcagtaacgtactgtcacatattggctcagtgaccgccaaagattttgtccgtgtttcgggtctgacgatgaaagacatcattcgcgaagcagcacgcgaaggccatgatctgttgttcgctgataacccgtcggcggtgctgaaggagctgacaggcctcatccagaacacgattcgctccaaatggcacgaagttctggag

SEQ ID NO: 2848 - protein, 346 aa, synthetic construct
  REGION 1..346: note = variant of RNA ligase 2 from Klebsiella phage KP179
MHHHHHHGGSNMFAYYSSLENHTNAKFISKIRGAGFLSHTVEWVAREKIHGTNFSVIITPTEIVPAKRTGPILEDESFFEHEIIMKKYMDSFKKVQNMLNAMDLVSVQIFGEFAGGGIQKGFDYGDKDFYVFDILSDSGNEKSYWDDYRVESFCTTVGLKLAPLLGRGSFAELSQYPNDFKSLVNRYNELVDTVGLEMANKHVFGPQASSEEGLAEGYVLKPVYPRFFNVGTRVAIKCKNSKFSEKAFLIEPIKAKVELTENDKRLLGIFSEYVTWNRVSNVLSHIGSVTAKDFVRVSGLTMKDIIREAAREGHDLLFADNPSAVLKELTGLIQNTIRSKWHEVLE

SEQ ID NO: 2849 - DNA, 1038 bp, synthetic construct
  misc_feature 1..1038: note = variant of RNA ligase 2 from Klebsiella phage KP179
  source 1..1038: mol_type = other DNA
atgcatcaccatcaccatcacggtggcagcaacatgtttgcgtattattcaagtctggaaaaccataccaatgccaagttcattagcaagatccgtggtgcaggcttcctgagccacaccgtggaatgggtagctcgcgagaagattcatggaacgaactttagcgttatcattactccgaccgaaatcgtgccggccaaacgcacagggccgatcttggaagacgagagcttctttggtcatgaaattatcatgaaaaaatatatggactccttcaaaaaggtgcagaacatgctgaatgcgatggatcttgttagcgtgcaaatctttggcgaatttgcgggtggtggcattcagaaaggctttgattacggagacaaagatttctatgtgtttgacatcctgtctgatagcgggaacgagaaaagctactgggatgactatcgcgtcgaatcgttttgcaccactgttggtctgaaattagcgcctctgctgggacgtggtagtttcgctgaactgtcccagtacccaaacgatttcaaaagcctggtgaaccgttataatgaattggttgatacggtcggcctggagatggccaataaacacgtctttggtccgcaagcgtcttctgaagaaggcctggcagaaggctacgttcttaaacccgtctatccgcgcttctttaatgtgggtacgcgcgtggcgattaaatgcaagaactccaaattttcggagaaagcctttctgattgaaccatggaaagcgaaggttgaactgacggagaacgataaacgtctgctcggaatctttagcgaatatgttacctggaaccgcgtcagtaacgtactgtcacatattggctcagtgaccgccaaagattttgtccgtgtttcgggtctgacgatgaaagacatcattcgcgaagcagcacgcgaaggccatgatctgttgttcgctgataacccgtcggcggtgctgaaggagctgacaggcctcatccagaacacgattcgctccaaatggcacgaagttctggag

SEQ ID NO: 2850 - protein, 346 aa, synthetic construct
  REGION 1..346: note = variant of RNA ligase 2 from Klebsiella phage KP179
MHHHHHHGGSNMFAYYSSLENHTNAKFISKIRGAGFLSHTVEWVAREKIHGTNFSVIITPTEIVPAKRTGPILEDESFFGHEIIMKKYMDSFKKVQNMLNAMDLVSVQIFGEFAGGGIQKGFDYGDKDFYVFDILSDSGNEKSYWDDYRVESFCTTVGLKLAPLLGRGSFAELSQYPNDFKSLVNRYNELVDTVGLEMANKHVFGPQASSEEGLAEGYVLKPVYPRFFNVGTRVAIKCKNSKFSEKAFLIEPWKAKVELTENDKRLLGIFSEYVTWNRVSNVLSHIGSVTAKDFVRVSGLTMKDIIREAAREGHDLLFADNPSAVLKELTGLIQNTIRSKWHEVLE

SEQ ID NO: 2851 - DNA, 1038 bp, synthetic construct
  misc_feature 1..1038: note = variant of RNA ligase 2 from Klebsiella phage KP179
  source 1..1038: mol_type = other DNA
atgcatcaccatcaccatcacggtggcagcaacatgtttgcgtattattcaagtctggaaaaccataccaatgccaagttcattagcaagatccgtggtgcaggcttcctgagccacaccgtggaatgggtagctcgcgagaagattcatggaacgaactttagcgttatcattactccgaccgaaatcgtgccggccaaacgcacagggccgatcttggaagacgagagcttctttggtcatgaagagatcatgaaaaaatatatggactccttcaaaaaggtgcagaacatgctgaatgcgatggatcttgttagcgtgcaaatctttggcgaatttgcgggtggtggcattcagaaaggctttgattacggagacaaagatttctatgtgtttgacatcctgtctgatagcgggaacgagaaaagctactgggatgactatcgcgtcgaatcgttttgcaccactgttggtctgaaattagcgcctctgctgggacgtggtagtttcgctgaactgtcccagtacccaaacgatttcaaaagcctggtgaaccgttataatgaattggttgatacggtcggcctggagatggccaataaacacgtctttggtccgcaagcgtcttctgaagaaggcctggcagaaggctacgttcttaaacccgtctatccgcgcttctttaatgtgggtacgcgcgtggcgattaaatgcaagaactccaaattttcggagaaagcctttctgattgaaccaattaaagcgaaggttgaactgacggagaacgataaacgtctgctcggaatctttagcgaatatgttacctggaaccgcgtcagtaacgtactgtcacatattggctcagtgaccgccaaagattttgtccgtgtttcgggtctgacgatgaaagacatcattcgcgaagcagcacgcgaaggccatgatctgttgttcgctgataacccgtcggcggtgctgaaggagctgacaggcctcatccagaacacgattcgctccaaatggcacgaagttctggag

SEQ ID NO: 2852 - protein, 346 aa, synthetic construct
  REGION 1..346: note = variant of RNA ligase 2 from Klebsiella phage KP179
MHHHHHHGGSNMFAYYSSLENHTNAKFISKIRGAGFLSHTVEWVAREKIHGTNFSVIITPTEIVPAKRTGPILEDESFFGHEEIMKKYMDSFKKVQNMLNAMDLVSVQIFGEFAGGGIQKGFDYGDKDFYVFDILSDSGNEKSYWDDYRVESFCTTVGLKLAPLLGRGSFAELSQYPNDFKSLVNRYNELVDTVGLEMANKHVFGPQASSEEGLAEGYVLKPVYPRFFNVGTRVAIKCKNSKFSEKAFLIEPIKAKVELTENDKRLLGIFSEYVTWNRVSNVLSHIGSVTAKDFVRVSGLTMKDIIREAAREGHDLLFADNPSAVLKELTGLIQNTIRSKWHEVLE

SEQ ID NO: 2853 - DNA, 1038 bp, synthetic construct
  misc_feature 1..1038: note = variant of RNA ligase 2 from Klebsiella phage KP179
  source 1..1038: mol_type = other DNA
atgcatcaccatcaccatcacggtggcagcaacatgtttgcgtattattcaagtctggaaaaccataccaatgccaagttcattagcaagatccgtggtgcaggcttcctgagccacaccgtggaatgggtagctcgcgagaagattcatggaacgaactttagcgttatcattactccgaccgaaatcgtgccggccaaacgcacagggccgatcttggaagacgagagcttctttggtcatgaaacgatcatgaaaaaatatatggactccttcaaaaaggtgcagaacatgctgaatgcgatggatcttgttagcgtgcaaatctttggcgaatttgcgggtggtggcattcagaaaggctttgattacggagacaaagatttctatgtgtttgacatcctgtctgatagcgggaacgagaaaagctactgggatgactatcgcgtcgaatcgttttgcaccactgttggtctgaaattagcgcctctgctgggacgtggtagtttcgctgaactgtcccagtacccaaacgatttcaaaagcctggtgaaccgttataatgaattggttgatacggtcggcctggagatggccaataaacacgtctttggtccgcaagcgtcttctgaagaaggcctggcagaaggctacgttcttaaacccgtctatccgcgcttctttaatgtgggtacgcgcgtggcgattaaatgcaagaactccaaattttcggagaaagcctttctgattgaaccaattaaagcgaaggttgaactgacggagaacgataaacgtctgctcggaatctttagcgaatatgttacctggaaccgcgtcagtaacgtactgtcacatattggctcagtgaccgccaaagattttgtccgtgtttcgggtctgacgatgaaagacatcattcgcgaagcagcacgcgaaggccatgatctgttgttcgctgataacccgtcggcggtgctgaaggagctgacaggcctcatccagaacacgattcgctccaaatggcacgaagttctggag

SEQ ID NO: 2854 - protein, 346 aa, synthetic construct
  REGION 1..346: note = variant of RNA ligase 2 from Klebsiella phage KP179
MHHHHHHGGSNMFAYYSSLENHTNAKFISKIRGAGFLSHTVEWVAREKIHGTNFSVIITPTEIVPAKRTGPILEDESFFGHETIMKKYMDSFKKVQNMLNAMDLVSVQIFGEFAGGGIQKGFDYGDKDFYVFDILSDSGNEKSYWDDYRVESFCTTVGLKLAPLLGRGSFAELSQYPNDFKSLVNRYNELVDTVGLEMANKHVFGPQASSEEGLAEGYVLKPVYPRFFNVGTRVAIKCKNSKFSEKAFLIEPIKAKVELTENDKRLLGIFSEYVTWNRVSNVLSHIGSVTAKDFVRVSGLTMKDIIREAAREGHDLLFADNPSAVLKELTGLIQNTIRSKWHEVLE

SEQ ID NO: 2855 - DNA, 1038 bp, synthetic construct
  misc_feature 1..1038: note = variant of RNA ligase 2 from Klebsiella phage KP179
  source 1..1038: mol_type = other DNA
atgcatcaccatcaccatcacggtggcagcaacatgtttgcgtattattcaagtctggaaaaccataccaatgccaagttcattagcaagatccgtggtgcaggcttcctgagccacaccgtggaatgggtagctcgcgagaagattcatggaacgaactttagcgttatcattactccgaccgaaatcgtgccggccaaacgcacagggccgatcttggaagacgagagcttctttggtcatgaaattatcatgaaaaaatatatggactccttcaaaaaggtgcagaacatgctgaatgcgatggatcttgttagcgtgcaaatctttggcgaatttgcgggtggtggcattcagaaaggctttgattacggagacaaagatttctatgtgtttgacatcctgtctgatagcgggaacgagaaaagctactgggatgactatcgcgtcgaatcgttttgcaccactgttggtctgaaattagcgcctctgctgggacgtggtagtttcgctgaactgtcccagtacccaaacgatttcaaaagcctggtgaaccgttataatgaattggttgatacggtcggcctggagatggccaataaacacgtctttggtccgcaagcgtcttctgaagaaggcctggcagaaggctacgttcttaaacccgtctatccgcgcttctttaatgtgggtacgcgcgtggcgattaaatgcaagaactccaaattttcggagaaagcctttctgattgaaccaattcaggcgaaggttgaactgacggagaacgataaacgtctgctcggaatctttagcgaatatgttacctggaaccgcgtcagtaacgtactgtcacatattggctcagtgaccgccaaagattttgtccgtgtttcgggtctgacgatgaaagacatcattcgcgaagcagcacgcgaaggccatgatctgttgttcgctgataacccgtcggcggtgctgaaggagctgacaggcctcatccagaacacgattcgctccaaatggcacgaagttctggag

SEQ ID NO: 2856 - protein, 346 aa, synthetic construct
  REGION 1..346: note = variant of RNA ligase 2 from Klebsiella phage KP179
MHHHHHHGGSNMFAYYSSLENHTNAKFISKIRGAGFLSHTVEWVAREKIHGTNFSVIITPTEIVPAKRTGPILEDESFFGHEIIMKKYMDSFKKVQNMLNAMDLVSVQIFGEFAGGGIQKGFDYGDKDFYVFDILSDSGNEKSYWDDYRVESFCTTVGLKLAPLLGRGSFAELSQYPNDFKSLVNRYNELVDTVGLEMANKHVFGPQASSEEGLAEGYVLKPVYPRFFNVGTRVAIKCKNSKFSEKAFLIEPIQAKVELTENDKRLLGIFSEYVTWNRVSNVLSHIGSVTAKDFVRVSGLTMKDIIREAAREGHDLLFADNPSAVLKELTGLIQNTIRSKWHEVLE

SEQ ID NO: 2857 - DNA, 1038 bp, synthetic construct
  misc_feature 1..1038: note = variant of RNA ligase 2 from Klebsiella phage KP179
  source 1..1038: mol_type = other DNA
atgcatcaccatcaccatcacggtggcagcaacatgtttgcgtattattcaagtctggaaaaccataccaatgccaagttcattagcaagatccgtggtgcaggcttcctgagccacaccgtggaatgggtagctcgcgagaagattcatggaacgaactttagcgttatcattactccgaccgaaatcgtgccggccaaacgcacagggccgatcttggaagacgagagcttctttggtcatgaaattatcatgaaaaaatatatggactccttcaaaaaggtgcagaacatgctgaatgcgatggatcttgttagcgtgcaaatctttggcgaatttgcgggtggtggcattcagaaaggctttgattacggagacaaagatttctatgtgtttgacatcctgtctgatagcgggaacgagaaaagctactgggatgactatcgcgtcgaatcgttttgcaccactgttggtctgaaattagcgcctctgctgggacgtggtagtttcgctgaactgtcccagtacccaaacgatttcaaaagcctggtgaaccgttataatgaattggttgatacggtcggcctggagatggccaataaacacgtctttggtccgcaagcgtcttctgaagaaggcctggcagaaggctacgttcttaaacccgtctatccgcgcttctttaatgtgggtacgcgcgtggcgattaaatgcaagaactccaaattttcggagaaagcctttctgattgaaccaattgtggcgaaggttgaactgacggagaacgataaacgtctgctcggaatctttagcgaatatgttacctggaaccgcgtcagtaacgtactgtcacatattggctcagtgaccgccaaagattttgtccgtgtttcgggtctgacgatgaaagacatcattcgcgaagcagcacgcgaaggccatgatctgttgttcgctgataacccgtcggcggtgctgaaggagctgacaggcctcatccagaacacgattcgctccaaatggcacgaagttctggag

SEQ ID NO: 2858 - protein, 346 aa, synthetic construct
  REGION 1..346: note = variant of RNA ligase 2 from Klebsiella phage KP179
MHHHHHHGGSNMFAYYSSLENHTNAKFISKIRGAGFLSHTVEWVAREKIHGTNFSVIITPTEIVPAKRTGPILEDESFFGHEIIMKKYMDSFKKVQNMLNAMDLVSVQIFGEFAGGGIQKGFDYGDKDFYVFDILSDSGNEKSYWDDYRVESFCTTVGLKLAPLLGRGSFAELSQYPNDFKSLVNRYNELVDTVGLEMANKHVFGPQASSEEGLAEGYVLKPVYPRFFNVGTRVAIKCKNSKFSEKAFLIEPIVAKVELTENDKRLLGIFSEYVTWNRVSNVLSHIGSVTAKDFVRVSGLTMKDIIREAAREGHDLLFADNPSAVLKELTGLIQNTIRSKWHEVLE

SEQ ID NO: 2859 - DNA, 1038 bp, synthetic construct
  misc_feature 1..1038: note = variant of RNA ligase 2 from Klebsiella phage KP179
  source 1..1038: mol_type = other DNA
atgcatcaccatcaccatcacggtggcagcaacatgtttgcgtattattcaagtctggaaaaccataccaatgccaagttcattagcaagatccgtggtgcaggcttcctgagccacaccgtggaatgggtagctcgcgagaagattcatggaacgaactttagcgttatcattactccgaccgaaatcgtgccggccaaacgcacagggccgatcttggaagacgagagcttctttggtcatgaaattatcatgaaaaaatatatggactccttcaaaaaggtgcagaacatgctgaatgcgatggatcttgttagcgtgcaaatctttggcgaatttgcgggtggtggcattcagaaaggctttgattacggagacaaagatttctatgtgtttgacatcctgtctgatagcgggaacgagaaaagctactgggatgactatcgcgtcgaatcgttttgcaccactgttggtctgaaattagcgcctctgctgggacgtggtagtttcgctgaactgtcccagtacccaaacgatttcaaaagcctggtgaaccgttataatgaattggttgatacggtcggcctggagatggccaataaacacgtctttggtccgcaagcgtcttctgaagaaggcctggcagaaggctacgttcttaaacccgtctatccgcgcttctttaatgtgggtacgcgcgtggcgattaaatgcaagaactccaaattttcggagaaagcctttctgattgaaccaattaaagcggcggttgaactgacggagaacgataaacgtctgctcggaatctttagcgaatatgttacctggaaccgcgtcagtaacgtactgtcacatattggctcagtgaccgccaaagattttgtccgtgtttcgggtctgacgatgaaagacatcattcgcgaagcagcacgcgaaggccatgatctgttgttcgctgataacccgtcggcggtgctgaaggagctgacaggcctcatccagaacacgattcgctccaaatggcacgaagttctggag

SEQ ID NO: 2860 - protein, 346 aa, synthetic construct
  REGION 1..346: note = variant of RNA ligase 2 from Klebsiella phage KP179
MHHHHHHGGSNMFAYYSSLENHTNAKFISKIRGAGFLSHTVEWVAREKIHGTNFSVIITPTEIVPAKRTGPILEDESFFGHEIIMKKYMDSFKKVQNMLNAMDLVSVQIFGEFAGGGIQKGFDYGDKDFYVFDILSDSGNEKSYWDDYRVESFCTTVGLKLAPLLGRGSFAELSQYPNDFKSLVNRYNELVDTVGLEMANKHVFGPQASSEEGLAEGYVLKPVYPRFFNVGTRVAIKCKNSKFSEKAFLIEPIKAAVELTENDKRLLGIFSEYVTWNRVSNVLSHIGSVTAKDFVRVSGLTMKDIIREAAREGHDLLFADNPSAVLKELTGLIQNTIRSKWHEVLE

SEQ ID NO: 2861 - DNA, 1038 bp, synthetic construct
  misc_feature 1..1038: note = variant of RNA ligase 2 from Klebsiella phage KP179
  source 1..1038: mol_type = other DNA
atgcatcaccatcaccatcacggtggcagcaacatgtttgcgtattattcaagtctggaaaaccataccaatgccaagttcattagcaagatccgtggtgcaggcttcctgagccacaccgtggaatgggtagctcgcgagaagattcatggaacgaactttagcgttatcattactccgaccgaaatcgtgccggccaaacgcacagggccgatcttggaagacgagagcttctttggtcatgaaattatcatgaaaaaatatatggactccttcaaaaaggtgcagaacatgctgaatgcgatggatcttgttagcgtgcaaatctttggcgaatttgcgggtggtggcattcagaaaggctttgattacggagacaaagatttctatgtgtttgacatcctgtctgatagcgggaacgagaaaagctactgggatgactatcgcgtcgaatcgttttgcaccactgttggtctgaaattagcgcctctgctgggacgtggtagtttcgctgaactgtcccagtacccaaacgatttcaaaagcctggtgaaccgttataatgaattggttgatacggtcggcctggagatggccaataaacacgtctttggtccgcaagcgtcttctgaagaaggcctggcagaaggctacgttcttaaacccgtctatccgcgcttctttaatgtgggtacgcgcgtggcgattaaatgcaagaactccaaattttcggagaaagcctttctgattgaaccaattaaagcgggggttgaactgacggagaacgataaacgtctgctcggaatctttagcgaatatgttacctggaaccgcgtcagtaacgtactgtcacatattggctcagtgaccgccaaagattttgtccgtgtttcgggtctgacgatgaaagacatcattcgcgaagcagcacgcgaaggccatgatctgttgttcgctgataacccgtcggcggtgctgaaggagctgacaggcctcatccagaacacgattcgctccaaatggcacgaagttctggag

SEQ ID NO: 2862 - protein, 346 aa, synthetic construct
  REGION 1..346: note = variant of RNA ligase 2 from Klebsiella phage KP179
MHHHHHHGGSNMFAYYSSLENHTNAKFISKIRGAGFLSHTVEWVAREKIHGTNFSVIITPTEIVPAKRTGPILEDESFFGHEIIMKKYMDSFKKVQNMLNAMDLVSVQIFGEFAGGGIQKGFDYGDKDFYVFDILSDSGNEKSYWDDYRVESFCTTVGLKLAPLLGRGSFAELSQYPNDFKSLVNRYNELVDTVGLEMANKHVFGPQASSEEGLAEGYVLKPVYPRFFNVGTRVAIKCKNSKFSEKAFLIEPIKAGVELTENDKRLLGIFSEYVTWNRVSNVLSHIGSVTAKDFVRVSGLTMKDIIREAAREGHDLLFADNPSAVLKELTGLIQNTIRSKWHEVLE

SEQ ID NO: 2863 - DNA, 1038 bp, synthetic construct
  misc_feature 1..1038: note = variant of RNA ligase 2 from Klebsiella phage KP179
  source 1..1038: mol_type = other DNA
atgcatcaccatcaccatcacggtggcagcaacatgtttgcgtattattcaagtctggaaaaccataccaatgccaagttcattagcaagatccgtggtgcaggcttcctgagccacaccgtggaatgggtagctcgcgagaagattcatggaacgaactttagcgttatcattactccgaccgaaatcgtgccggccaaacgcacagggccgatcttggaagacgagagcttctttggtcatgaaattatcatgaaaaaatatatggactccttcaaaaaggtgcagaacatgctgaatgcgatggatcttgttagcgtgcaaatctttggcgaatttgcgggtggtggcattcagaaaggctttgattacggagacaaagatttctatgtgtttgacatcctgtctgatagcgggaacgagaaaagctactgggatgactatcgcgtcgaatcgttttgcaccactgttggtctgaaattagcgcctctgctgggacgtggtagtttcgctgaactgtcccagtacccaaacgatttcaaaagcctggtgaaccgttataatgaattggttgatacggtcggcctggagatggccaataaacacgtctttggtccgcaagcgtcttctgaagaaggcctggcagaaggctacgttcttaaacccgtctatccgcgcttctttaatgtgggtacgcgcgtggcgattaaatgcaagaactccaaattttcggagaaagcctttctgattgaaccaattaaagcgatggttgaactgacggagaacgataaacgtctgctcggaatctttagcgaatatgttacctggaaccgcgtcagtaacgtactgtcacatattggctcagtgaccgccaaagattttgtccgtgtttcgggtctgacgatgaaagacatcattcgcgaagcagcacgcgaaggccatgatctgttgttcgctgataacccgtcggcggtgctgaaggagctgacaggcctcatccagaacacgattcgctccaaatggcacgaagttctggag

SEQ ID NO: 2864 - protein, 346 aa, synthetic construct
  REGION 1..346: note = variant of RNA ligase 2 from Klebsiella phage KP179
MHHHHHHGGSNMFAYYSSLENHTNAKFISKIRGAGFLSHTVEWVAREKIHGTNFSVIITPTEIVPAKRTGPILEDESFFGHEIIMKKYMDSFKKVQNMLNAMDLVSVQIFGEFAGGGIQKGFDYGDKDFYVFDILSDSGNEKSYWDDYRVESFCTTVGLKLAPLLGRGSFAELSQYPNDFKSLVNRYNELVDTVGLEMANKHVFGPQASSEEGLAEGYVLKPVYPRFFNVGTRVAIKCKNSKFSEKAFLIEPIKAMVELTENDKRLLGIFSEYVTWNRVSNVLSHIGSVTAKDFVRVSGLTMKDIIREAAREGHDLLFADNPSAVLKELTGLIQNTIRSKWHEVLE

SEQ ID NO: 2865 - DNA, 1038 bp, synthetic construct
  misc_feature 1..1038: note = variant of RNA ligase 2 from Klebsiella phage KP179
  source 1..1038: mol_type = other DNA
atgcatcaccatcaccatcacggtggcagcaacatgtttgcgtattattcaagtctggaaaaccataccaatgccaagttcattagcaagatccgtggtgcaggcttcctgagccacaccgtggaatgggtagctcgcgagaagattcatggaacgaactttagcgttatcattactccgaccgaaatcgtgccggccaaacgcacagggccgatcttggaagacgagagcttctttggtcatgaaattatcatgaaaaaatatatggactccttcaaaaaggtgcagaacatgctgaatgcgatggatcttgttagcgtgcaaatctttggcgaatttgcgggtggtggcattcagaaaggctttgattacggagacaaagatttctatgtgtttgacatcctgtctgatagcgggaacgagaaaagctactgggatgactatcgcgtcgaatcgttttgcaccactgttggtctgaaattagcgcctctgctgggacgtggtagtttcgctgaactgtcccagtacccaaacgatttcaaaagcctggtgaaccgttataatgaattggttgatacggtcggcctggagatggccaataaacacgtctttggtccgcaagcgtcttctgaagaaggcctggcagaaggctacgttcttaaacccgtctatccgcgcttctttaatgtgggtacgcgcgtggcgattaaatgcaagaactccaaattttcggagaaagcctttctgattgaaccaattaaagcgtgggttgaactgacggagaacgataaacgtctgctcggaatctttagcgaatatgttacctggaaccgcgtcagtaacgtactgtcacatattggctcagtgaccgccaaagattttgtccgtgtttcgggtctgacgatgaaagacatcattcgcgaagcagcacgcgaaggccatgatctgttgttcgctgataacccgtcggcggtgctgaaggagctgacaggcctcatccagaacacgattcgctccaaatggcacgaagttctggag

SEQ ID NO: 2866 - protein, 346 aa, synthetic construct
  REGION 1..346: note = variant of RNA ligase 2 from Klebsiella phage KP179
MHHHHHHGGSNMFAYYSSLENHTNAKFISKIRGAGFLSHTVEWVAREKIHGTNFSVIITPTEIVPAKRTGPILEDESFFGHEIIMKKYMDSFKKVQNMLNAMDLVSVQIFGEFAGGGIQKGFDYGDKDFYVFDILSDSGNEKSYWDDYRVESFCTTVGLKLAPLLGRGSFAELSQYPNDFKSLVNRYNELVDTVGLEMANKHVFGPQASSEEGLAEGYVLKPVYPRFFNVGTRVAIKCKNSKFSEKAFLIEPIKAWVELTENDKRLLGIFSEYVTWNRVSNVLSHIGSVTAKDFVRVSGLTMKDIIREAAREGHDLLFADNPSAVLKELTGLIQNTIRSKWHEVLE

SEQ ID NO: 2867 - DNA, 1038 bp, synthetic construct
  misc_feature 1..1038: note = variant of RNA ligase 2 from Klebsiella phage KP179
  source 1..1038: mol_type = other DNA
atgcatcaccatcaccatcacggtggcagcaacatgtttgcgtattattcaagtctggaaaaccataccaatgccaagttcattagccttatccgtggtgcaggcttcctgagccacaccgtggaatgggtagctcgcgagaagattcatggaacgaactttagcgttatcattactccgaccgaaatcgtgccggccaaacgcacagggccgatcttggaagacgagagcttctttggtcatgaaattatcatgaaaaaatatatggactccttcaaaaaggtgcagaacatgctgaatgcgatggatcttgttagcgtgcaaatctttggcgaatttgcgggtggtggcattcagaaaggctttgattacggagacaaagatttctatgtgtttgacatcctgtctgatagcgggaacgagaaaagctactgggatgactatcgcgtcgaatcgttttgcaccactgttggtctgaaattagcgcctctgctgggacgtggtagtttcgctgaactgtcccagtacccaaacgatttcaaaagcctggtgaaccgttataatgaattggttgatacggtcggcctggagatggccaataaacacgtctttggtccgcaagcgtcttctgaagaaggcctggcagaaggctacgttcttaaacccgtctatccgcgcttctttaatgtgggtacgcgcgtggcgattaaatgcaagaactccaaattttcggagaaagcctttctgattgaaccaattaaagcgaaggttgaactgacggagaacgataaacgtctgctcggaatctttagcgaatatgttacctggaaccgcgtcagtaacgtactgtcacatattggctcagtgaccgccaaagattttgtccgtgtttcgggtctgacgatgaaagacatcattcgcgaagcagcacgcgaaggccatgatctgttgttcgctgataacccgtcggcggtgctgaaggagctgacaggcctcatccagaacacgattcgctccaaatggcacgaagttctggag

SEQ ID NO: 2868 - protein, 346 aa, synthetic construct
  REGION 1..346: note = variant of RNA ligase 2 from Klebsiella phage KP179
MHHHHHHGGSNMFAYYSSLENHTNAKFISLIRGAGFLSHTVEWVAREKIHGTNFSVIITPTEIVPAKRTGPILEDESFFGHEIIMKKYMDSFKKVQNMLNAMDLVSVQIFGEFAGGGIQKGFDYGDKDFYVFDILSDSGNEKSYWDDYRVESFCTTVGLKLAPLLGRGSFAELSQYPNDFKSLVNRYNELVDTVGLEMANKHVFGPQASSEEGLAEGYVLKPVYPRFFNVGTRVAIKCKNSKFSEKAFLIEPIKAKVELTENDKRLLGIFSEYVTWNRVSNVLSHIGSVTAKDFVRVSGLTMKDIIREAAREGHDLLFADNPSAVLKELTGLIQNTIRSKWHEVLE

SEQ ID NO: 2869 - DNA, 1038 bp, synthetic construct
  misc_feature 1..1038: note = variant of RNA ligase 2 from Klebsiella phage KP179
  source 1..1038: mol_type = other DNA
atgcatcaccatcaccatcacggtggcagcaacatgtttgcgtattattcaagtctggaaaaccataccaatgccaagttcattagcgtgatccgtggtgcaggcttcctgagccacaccgtggaatgggtagctcgcgagaagattcatggaacgaactttagcgttatcattactccgaccgaaatcgtgccggccaaacgcacagggccgatcttggaagacgagagcttctttggtcatgaaattatcatgaaaaaatatatggactccttcaaaaaggtgcagaacatgctgaatgcgatggatcttgttagcgtgcaaatctttggcgaatttgcgggtggtggcattcagaaaggctttgattacggagacaaagatttctatgtgtttgacatcctgtctgatagcgggaacgagaaaagctactgggatgactatcgcgtcgaatcgttttgcaccactgttggtctgaaattagcgcctctgctgggacgtggtagtttcgctgaactgtcccagtacccaaacgatttcaaaagcctggtgaaccgttataatgaattggttgatacggtcggcctggagatggccaataaacacgtctttggtccgcaagcgtcttctgaagaaggcctggcagaaggctacgttcttaaacccgtctatccgcgcttctttaatgtgggtacgcgcgtggcgattaaatgcaagaactccaaattttcggagaaagcctttctgattgaaccaattaaagcgaaggttgaactgacggagaacgataaacgtctgctcggaatctttagcgaatatgttacctggaaccgcgtcagtaacgtactgtcacatattggctcagtgaccgccaaagattttgtccgtgtttcgggtctgacgatgaaagacatcattcgcgaagcagcacgcgaaggccatgatctgttgttcgctgataacccgtcggcggtgctgaaggagctgacaggcctcatccagaacacgattcgctccaaatggcacgaagttctggag

SEQ ID NO: 2870 - protein, 346 aa, synthetic construct
  REGION 1..346: note = variant of RNA ligase 2 from Klebsiella phage KP179
MHHHHHHGGSNMFAYYSSLENHTNAKFISVIRGAGFLSHTVEWVAREKIHGTNFSVIITPTEIVPAKRTGPILEDESFFGHEIIMKKYMDSFKKVQNMLNAMDLVSVQIFGEFAGGGIQKGFDYGDKDFYVFDILSDSGNEKSYWDDYRVESFCTTVGLKLAPLLGRGSFAELSQYPNDFKSLVNRYNELVDTVGLEMANKHVFGPQASSEEGLAEGYVLKPVYPRFFNVGTRVAIKCKNSKFSEKAFLIEPIKAKVELTENDKRLLGIFSEYVTWNRVSNVLSHIGSVTAKDFVRVSGLTMKDIIREAAREGHDLLFADNPSAVLKELTGLIQNTIRSKWHEVLE

SEQ ID NO: 2871 - DNA, 1038 bp, synthetic construct
  misc_feature 1..1038: note = variant of RNA ligase 2 from Klebsiella phage KP179
  source 1..1038: mol_type = other DNA
atgcatcaccatcaccatcacggtggcagcaacatgtttgcgtattattcaagtctggaaaaccataccaatgccaagttcattagctggatccgtggtgcaggcttcctgagccacaccgtggaatgggtagctcgcgagaagattcatggaacgaactttagcgttatcattactccgaccgaaatcgtgccggccaaacgcacagggccgatcttggaagacgagagcttctttggtcatgaaattatcatgaaaaaatatatggactccttcaaaaaggtgcagaacatgctgaatgcgatggatcttgttagcgtgcaaatctttggcgaatttgcgggtggtggcattcagaaaggctttgattacggagacaaagatttctatgtgtttgacatcctgtctgatagcgggaacgagaaaagctactgggatgactatcgcgtcgaatcgttttgcaccactgttggtctgaaattagcgcctctgctgggacgtggtagtttcgctgaactgtcccagtacccaaacgatttcaaaagcctggtgaaccgttataatgaattggttgatacggtcggcctggagatggccaataaacacgtctttggtccgcaagcgtcttctgaagaaggcctggcagaaggctacgttcttaaacccgtctatccgcgcttctttaatgtgggtacgcgcgtggcgattaaatgcaagaactccaaattttcggagaaagcctttctgattgaaccaattaaagcgaaggttgaactgacggagaacgataaacgtctgctcggaatctttagcgaatatgttacctggaaccgcgtcagtaacgtactgtcacatattggctcagtgaccgccaaagattttgtccgtgtttcgggtctgacgatgaaagacatcattcgcgaagcagcacgcgaaggccatgatctgttgttcgctgataacccgtcggcggtgctgaaggagctgacaggcctcatccagaacacgattcgctccaaatggcacgaagttctggag

SEQ ID NO: 2872 - protein, 346 aa, synthetic construct
  REGION 1..346: note = variant of RNA ligase 2 from Klebsiella phage KP179
MHHHHHHGGSNMFAYYSSLENHTNAKFISWIRGAGFLSHTVEWVAREKIHGTNFSVIITPTEIVPAKRTGPILEDESFFGHEIIMKKYMDSFKKVQNMLNAMDLVSVQIFGEFAGGGIQKGFDYGDKDFYVFDILSDSGNEKSYWDDYRVESFCTTVGLKLAPLLGRGSFAELSQYPNDFKSLVNRYNELVDTVGLEMANKHVFGPQASSEEGLAEGYVLKPVYPRFFNVGTRVAIKCKNSKFSEKAFLIEPIKAKVELTENDKRLLGIFSEYVTWNRVSNVLSHIGSVTAKDFVRVSGLTMKDIIREAAREGHDLLFADNPSAVLKELTGLIQNTIRSKWHEVLE

SEQ ID NO: 2873 - DNA, 1038 bp, synthetic construct
  misc_feature 1..1038: note = variant of RNA ligase 2 from Klebsiella phage KP179
  source 1..1038: mol_type = other DNA
atgcatcaccatcaccatcacggtggcagcaacatgtttgcgtattattcaagtctggaaaaccataccaatgccaagttcattagcaagatccgtggtgcaggcttcctgagccacaccgtggaatgggtagctcgcgagaagattcatggaacgaactttagcgttatcattactccgaccgaaatcgtgccggccaaacgcacagggccgatcttggaagacgagagcttctttggtcatgaaattatcatgaaaaaatatatggactccttcaaaaaggtgcagaacatgctgaatgcgatggatcttgttagcgtgcaaatctttggcgaatttgcgggtggtggcattcagaaaggctttgattacggagacaaagatttctatgtgtttgacatcctgtctgatagcgggaacgagaaaagctactgggatgactatcgcgtcgaatcgttttgcaccactgttggtctgaaattagcgcctctgctgggacgtggtagtttcgctgaactgtcccagtacccaaacgatttcaaaagcctggtgaaccgttataatgaattggttgatacggtcggcctggagatggccaataaacacgtctttggtccgcaagcgtcttctgaagaaggcctggcagaaggctacgttcttaaacccgtctatccgcgcttctttaatgtgggtacgcgcgtggcgattaaatgcaagaactccaaattttcggagaaagcctttctgattgaaccaattaaagcgaaggttgaactgacggagaacgataaacgtctgctcggaatctttagcgaatatgttacctggaaccgcgtcagtaacgtactgtcacatattggctcagtgaccgccaaagattttgtccgtgtttcgggtctgacgatgaaagacatcattcgcgaagcagcacgcgaaggccatgatctgttgttcgctgataacccgtcggcggtgctggaggagctgacaggcctcatccagaacacgattcgctccaaatggcacgaagttctggag

SEQ ID NO: 2874 - protein, 346 aa, synthetic construct
  REGION 1..346: note = variant of RNA ligase 2 from Klebsiella phage KP179
MHHHHHHGGSNMFAYYSSLENHTNAKFISKIRGAGFLSHTVEWVAREKIHGTNFSVIITPTEIVPAKRTGPILEDESFFGHEIIMKKYMDSFKKVQNMLNAMDLVSVQIFGEFAGGGIQKGFDYGDKDFYVFDILSDSGNEKSYWDDYRVESFCTTVGLKLAPLLGRGSFAELSQYPNDFKSLVNRYNELVDTVGLEMANKHVFGPQASSEEGLAEGYVLKPVYPRFFNVGTRVAIKCKNSKFSEKAFLIEPIKAKVELTENDKRLLGIFSEYVTWNRVSNVLSHIGSVTAKDFVRVSGLTMKDIIREAAREGHDLLFADNPSAVLEELTGLIQNTIRSKWHEVLE

SEQ ID NO: 2875 - DNA, 1038 bp, synthetic construct
  misc_feature 1..1038: note = variant of RNA ligase 2 from Klebsiella phage KP179
  source 1..1038: mol_type = other DNA
atgcatcaccatcaccatcacggtggcagcaacatgtttgcgtattattcaagtctggaaaaccataccaatgccaagttcattagcaagatccgtggtgcaggcttcctgagccacaccgtggaatgggtagctcgcgagaagattcatggaacgaactttagcgttatcattactccgaccgaaatcgtgccggccaaacgcacagggccgatccaggaagacgagagcttctttggtcatgaaattatcatgaaaaaatatatggactccttcaaaaaggtgcagaacatgctgaatgcgatggatcttgttagcgtgcaaatctttggcgaatttgcgggtggtggcattcagaaaggctttgattacggagacaaagatttctatgtgtttgacatcctgtctgatagcgggaacgagaaaagctactgggatgactatcgcgtcgaatcgttttgcaccactgttggtctgaaattagcgcctctgctgggacgtggtagtttcgctgaactgtcccagtacccaaacgatttcaaaagcctggtgaaccgttataatgaattggttgatacggtcggcctggagatggccaataaacacgtctttggtccgcaagcgtcttctgaagaaggcctggcagaaggctacgttcttaaacccgtctatccgcgcttctttaatgtgggtacgcgcgtggcgattaaatgcaagaactccaaattttcggagaaagcctttctgattgaaccaattaaagcgaaggttgaactgacggagaacgataaacgtctgctcggaatctttagcgaatatgttacctggaaccgcgtcagtaacgtactgtcacatattggctcagtgaccgccaaagattttgtccgtgtttcgggtctgacgatgaaagacatcattcgcgaagcagcacgcgaaggccatgatctgttgttcgctgataacccgtcggcggtgctgaaggagctgacaggcctcatccagaacacgattcgctccaaatggcacgaagttctggag

SEQ ID NO: 2876 - protein, 346 aa, synthetic construct
  REGION 1..346: note = variant of RNA ligase 2 from Klebsiella phage KP179
MHHHHHHGGSNMFAYYSSLENHTNAKFISKIRGAGFLSHTVEWVAREKIHGTNFSVIITPTEIVPAKRTGPIQEDESFFGHEIIMKKYMDSFKKVQNMLNAMDLVSVQIFGEFAGGGIQKGFDYGDKDFYVFDILSDSGNEKSYWDDYRVESFCTTVGLKLAPLLGRGSFAELSQYPNDFKSLVNRYNELVDTVGLEMANKHVFGPQASSEEGLAEGYVLKPVYPRFFNVGTRVAIKCKNSKFSEKAFLIEPIKAKVELTENDKRLLGIFSEYVTWNRVSNVLSHIGSVTAKDFVRVSGLTMKDIIREAAREGHDLLFADNPSAVLKELTGLIQNTIRSKWHEVLE

SEQ ID NO: 2877 - DNA, 1038 bp, synthetic construct
  misc_feature 1..1038: note = variant of RNA ligase 2 from Klebsiella phage KP179
  source 1..1038: mol_type = other DNA
atgcatcaccatcaccatcacggtggcagcaacatgtttgcgtattattcaagtctggaaaaccataccaatgccaagttcattagcaagatccgtggtgcaggcttcctgagccacaccgtggaatgggtagctcgcgagaagattcatggaacgaactttagcgttatcattactccgaccgaaatcgtgccggccaaacgcacagggccgatctgggaagacgagagcttctttggtcatgaaattatcatgaaaaaatatatggactccttcaaaaaggtgcagaacatgctgaatgcgatggatcttgttagcgtgcaaatctttggcgaatttgcgggtggtggcattcagaaaggctttgattacggagacaaagatttctatgtgtttgacatcctgtctgatagcgggaacgagaaaagctactgggatgactatcgcgtcgaatcgttttgcaccactgttggtctgaaattagcgcctctgctgggacgtggtagtttcgctgaactgtcccagtacccaaacgatttcaaaagcctggtgaaccgttataatgaattggttgatacggtcggcctggagatggccaataaacacgtctttggtccgcaagcgtcttctgaagaaggcctggcagaaggctacgttcttaaacccgtctatccgcgcttctttaatgtgggtacgcgcgtggcgattaaatgcaagaactccaaattttcggagaaagcctttctgattgaaccaattaaagcgaaggttgaactgacggagaacgataaacgtctgctcggaatctttagcgaatatgttacctggaaccgcgtcagtaacgtactgtcacatattggctcagtgaccgccaaagattttgtccgtgtttcgggtctgacgatgaaagacatcattcgcgaagcagcacgcgaaggccatgatctgttgttcgctgataacccgtcggcggtgctgaaggagctgacaggcctcatccagaacacgattcgctccaaatggcacgaagttctggag

SEQ ID NO: 2878 - protein, 346 aa, synthetic construct
  REGION 1..346: note = variant of RNA ligase 2 from Klebsiella phage KP179
MHHHHHHGGSNMFAYYSSLENHTNAKFISKIRGAGFLSHTVEWVAREKIHGTNFSVIITPTEIVPAKRTGPIWEDESFFGHEIIMKKYMDSFKKVQNMLNAMDLVSVQIFGEFAGGGIQKGFDYGDKDFYVFDILSDSGNEKSYWDDYRVESFCTTVGLKLAPLLGRGSFAELSQYPNDFKSLVNRYNELVDTVGLEMANKHVFGPQASSEEGLAEGYVLKPVYPRFFNVGTRVAIKCKNSKFSEKAFLIEPIKAKVELTENDKRLLGIFSEYVTWNRVSNVLSHIGSVTAKDFVRVSGLTMKDIIREAAREGHDLLFADNPSAVLKELTGLIQNTIRSKWHEVLE

SEQ ID NO: 2879 - DNA, 1038 bp, synthetic construct
  misc_feature 1..1038: note = variant of RNA ligase 2 from Klebsiella phage KP179
  source 1..1038: mol_type = other DNA
atgcatcaccatcaccatcacggtggcagcaacatgtttgcgtattattcaagtctggaaaaccataccaatgccaagttcattagcaagatccgtggtgcaggcttcctgagccacaccgtggaatgggtagctcgcgagaagattcatggaacgaactttagcgttatcattactccgaccgaaatcgtgccggccaaacgcacagggccgatcttggaagacgagagcttctttggtcatgaaattatcatgaaaaaatatatggactccttcaaaaaggtgcagaacatgctggcggcgatggatcttgttagcgtgcaaatctttggcgaatttgcgggtggtggcattcagaaaggctttgattacggagacaaagatttctatgtgtttgacatcctgtctgatagcgggaacgagaaaagctactgggatgactatcgcgtcgaatcgttttgcaccactgttggtctgaaattagcgcctctgctgggacgtggtagtttcgctgaactgtcccagtacccaaacgatttcaaaagcctggtgaaccgttataatgaattggttgatacggtcggcctggagatggccaataaacacgtctttggtccgcaagcgtcttctgaagaaggcctggcagaaggctacgttcttaaacccgtctatccgcgcttctttaatgtgggtacgcgcgtggcgattaaatgcaagaactccaaattttcggagaaagcctttctgattgaaccaattaaagcgaaggttgaactgacggagaacgataaacgtctgctcggaatctttagcgaatatgttacctggaaccgcgtcagtaacgtactgtcacatattggctcagtgaccgccaaagattttgtccgtgtttcgggtctgacgatgaaagacatcattcgcgaagcagcacgcgaaggccatgatctgttgttcgctgataacccgtcggcggtgctgaaggagctgacaggcctcatccagaacacgattcgctccaaatggcacgaagttctggag

SEQ ID NO: 2880 - protein, 346 aa, synthetic construct
  REGION 1..346: note = variant of RNA ligase 2 from Klebsiella phage KP179
MHHHHHHGGSNMFAYYSSLENHTNAKFISKIRGAGFLSHTVEWVAREKIHGTNFSVIITPTEIVPAKRTGPILEDESFFGHEIIMKKYMDSFKKVQNMLAAMDLVSVQIFGEFAGGGIQKGFDYGDKDFYVFDILSDSGNEKSYWDDYRVESFCTTVGLKLAPLLGRGSFAELSQYPNDFKSLVNRYNELVDTVGLEMANKHVFGPQASSEEGLAEGYVLKPVYPRFFNVGTRVAIKCKNSKFSEKAFLIEPIKAKVELTENDKRLLGIFSEYVTWNRVSNVLSHIGSVTAKDFVRVSGLTMKDIIREAAREGHDLLFADNPSAVLKELTGLIQNTIRSKWHEVLE

SEQ ID NO: 2881 - DNA, 1038 bp, synthetic construct
  misc_feature 1..1038: note = variant of RNA ligase 2 from Klebsiella phage KP179
  source 1..1038: mol_type = other DNA
atgcatcaccatcaccatcacggtggcagcaacatgtttgcgtattattcaagtctggaaaaccataccaatgccaagttcattagcaagatccgtggtgcaggcttcctgagccacaccgtggaatgggtagctcgcgagaagattcatggaacgaactttagcgttatcattactccgaccgaaatcgtgccggccaaacgcacagggccgatcttggaagacgagagcttctttggtcatgaaattatcatgaaaaaatatatggactccttcaaaaaggtgcagaacatgctgggggcgatggatcttgttagcgtgcaaatctttggcgaatttgcgggtggtggcattcagaaaggctttgattacggagacaaagatttctatgtgtttgacatcctgtctgatagcgggaacgagaaaagctactgggatgactatcgcgtcgaatcgttttgcaccactgttggtctgaaattagcgcctctgctgggacgtggtagtttcgctgaactgtcccagtacccaaacgatttcaaaagcctggtgaaccgttataatgaattggttgatacggtcggcctggagatggccaataaacacgtctttggtccgcaagcgtcttctgaagaaggcctggcagaaggctacgttcttaaacccgtctatccgcgcttctttaatgtgggtacgcgcgtggcgattaaatgcaagaactccaaattttcggagaaagcctttctgattgaaccaattaaagcgaaggttgaactgacggagaacgataaacgtctgctcggaatctttagcgaatatgttacctggaaccgcgtcagtaacgtactgtcacatattggctcagtgaccgccaaagattttgtccgtgtttcgggtctgacgatgaaagacatcattcgcgaagcagcacgcgaaggccatgatctgttgttcgctgataacccgtcggcggtgctgaaggagctgacaggcctcatccagaacacgattcgctccaaatggcacgaagttctggag

SEQ ID NO: 2882 - protein, 346 aa, synthetic construct
  REGION 1..346: note = variant of RNA ligase 2 from Klebsiella phage KP179
MHHHHHHGGSNMFAYYSSLENHTNAKFISKIRGAGFLSHTVEWVAREKIHGTNFSVIITPTEIVPAKRTGPILEDESFFGHEIIMKKYMDSFKKVQNMLGAMDLVSVQIFGEFAGGGIQKGFDYGDKDFYVFDILSDSGNEKSYWDDYRVESFCTTVGLKLAPLLGRGSFAELSQYPNDFKSLVNRYNELVDTVGLEMANKHVFGPQASSEEGLAEGYVLKPVYPRFFNVGTRVAIKCKNSKFSEKAFLIEPIKAKVELTENDKRLLGIFSEYVTWNRVSNVLSHIGSVTAKDFVRVSGLTMKDIIREAAREGHDLLFADNPSAVLKELTGLIQNTIRSKWHEVLE

SEQ ID NO: 2883 - DNA, 1038 bp, synthetic construct
  misc_feature 1..1038: note = variant of RNA ligase 2 from Klebsiella phage KP179
  source 1..1038: mol_type = other DNA
atgcatcaccatcaccatcacggtggcagcaacatgtttgcgtattattcaagtctggaaaaccataccaatgccaagttcattagcaagatccgtggtgcaggcttcctgagccacaccgtggaatgggtagctcgcgagaagattcatggaacgaactttagcgttatcattactccgaccgaaatcgtgccggccaaacgcacagggccgatcttggaagacgagagcttctttggtcatgaaattatcatgaaaaaatatatggactccttcaaaaaggtgcagaacatgctgcatgcgatggatcttgttagcgtgcaaatctttggcgaatttgcgggtggtggcattcagaaaggctttgattacggagacaaagatttctatgtgtttgacatcctgtctgatagcgggaacgagaaaagctactgggatgactatcgcgtcgaatcgttttgcaccactgttggtctgaaattagcgcctctgctgggacgtggtagtttcgctgaactgtcccagtacccaaacgatttcaaaagcctggtgaaccgttataatgaattggttgatacggtcggcctggagatggccaataaacacgtctttggtccgcaagcgtcttctgaagaaggcctggcagaaggctacgttcttaaacccgtctatccgcgcttctttaatgtgggtacgcgcgtggcgattaaatgcaagaactccaaattttcggagaaagcctttctgattgaaccaattaaagcgaaggttgaactgacggagaacgataaacgtctgctcggaatctttagcgaatatgttacctggaaccgcgtcagtaacgtactgtcacatattggctcagtgaccgccaaagattttgtccgtgtttcgggtctgacgatgaaagacatcattcgcgaagcagcacgcgaaggccatgatctgttgttcgctgataacccgtcggcggtgctgaaggagctgacaggcctcatccagaacacgattcgctccaaatggcacgaagttctggag

SEQ ID NO: 2884 - protein, 346 aa, synthetic construct
  REGION 1..346: note = variant of RNA ligase 2 from Klebsiella phage KP179
MHHHHHHGGSNMFAYYSSLENHTNAKFISKIRGAGFLSHTVEWVAREKIHGTNFSVIITPTEIVPAKRTGPILEDESFFGHEIIMKKYMDSFKKVQNMLHAMDLVSVQIFGEFAGGGIQKGFDYGDKDFYVFDILSDSGNEKSYWDDYRVESFCTTVGLKLAPLLGRGSFAELSQYPNDFKSLVNRYNELVDTVGLEMANKHVFGPQASSEEGLAEGYVLKPVYPRFFNVGTRVAIKCKNSKFSEKAFLIEPIKAKVELTENDKRLLGIFSEYVTWNRVSNVLSHIGSVTAKDFVRVSGLTMKDIIREAAREGHDLLFADNPSAVLKELTGLIQNTIRSKWHEVLE

SEQ ID NO: 2885 - DNA, 1038 bp, synthetic construct
  misc_feature 1..1038: note = variant of RNA ligase 2 from Klebsiella phage KP179
  source 1..1038: mol_type = other DNA
atgcatcaccatcaccatcacggtggcagcaacatgtttgcgtattattcaagtctggaaaaccataccaatgccaagttcattagcaagatccgtggtgcaggcttcctgagccacaccgtggaatgggtagctcgcgagaagattcatggaacgaactttagcgttatcattactccgaccgaaatcgtgccggccaaacgcacagggccgatcttggaagacgagagcttctttggtcatgaaattatcatgaaaaaatatatggactccttcaaaaaggtgcagaacatgctgtcggcgatggatcttgttagcgtgcaaatctttggcgaatttgcgggtggtggcattcagaaaggctttgattacggagacaaagatttctatgtgtttgacatcctgtctgatagcgggaacgagaaaagctactgggatgactatcgcgtcgaatcgttttgcaccactgttggtctgaaattagcgcctctgctgggacgtggtagtttcgctgaactgtcccagtacccaaacgatttcaaaagcctggtgaaccgttataatgaattggttgatacggtcggcctggagatggccaataaacacgtctttggtccgcaagcgtcttctgaagaaggcctggcagaaggctacgttcttaaacccgtctatccgcgcttctttaatgtgggtacgcgcgtggcgattaaatgcaagaactccaaattttcggagaaagcctttctgattgaaccaattaaagcgaaggttgaactgacggagaacgataaacgtctgctcggaatctttagcgaatatgttacctggaaccgcgtcagtaacgtactgtcacatattggctcagtgaccgccaaagattttgtccgtgtttcgggtctgacgatgaaagacatcattcgcgaagcagcacgcgaaggccatgatctgttgttcgctgataacccgtcggcggtgctgaaggagctgacaggcctcatccagaacacgattcgctccaaatggcacgaagttctggag

SEQ ID NO: 2886 - protein, 346 aa, synthetic construct
  REGION 1..346: note = variant of RNA ligase 2 from Klebsiella phage KP179
MHHHHHHGGSNMFAYYSSLENHTNAKFISKIRGAGFLSHTVEWVAREKIHGTNFSVIITPTEIVPAKRTGPILEDESFFGHEIIMKKYMDSFKKVQNMLSAMDLVSVQIFGEFAGGGIQKGFDYGDKDFYVFDILSDSGNEKSYWDDYRVESFCTTVGLKLAPLLGRGSFAELSQYPNDFKSLVNRYNELVDTVGLEMANKHVFGPQASSEEGLAEGYVLKPVYPRFFNVGTRVAIKCKNSKFSEKAFLIEPIKAKVELTENDKRLLGIFSEYVTWNRVSNVLSHIGSVTAKDFVRVSGLTMKDIIREAAREGHDLLFADNPSAVLKELTGLIQNTIRSKWHEVLE

SEQ ID NO: 2887 - DNA, 1038 bp, synthetic construct
  misc_feature 1..1038: note = variant of RNA ligase 2 from Klebsiella phage KP179
  source 1..1038: mol_type = other DNA
atgcatcaccatcaccatcacggtggcagcaacatgtttgcgtattattcaagtctggaaaaccataccaatgccaagttcattagcaagatccgtggtgcaggcttcctgagccacaccgtggaatgggtagctcgcgagaagattcatggaacgaactttagcgttatcattactccgaccgaaatcgtgccggccaaacgcacagggccgatcttggaagacgagagcttctttggtcatgaaattatcatgaaaaaatatatggactccttcaaaaaggtgcaggctatgctgaatgcgatggatcttgttagcgtgcaaatctttggcgaatttgcgggtggtggcattcagaaaggctttgattacggagacaaagatttctatgtgtttgacatcctgtctgatagcgggaacgagaaaagctactgggatgactatcgcgtcgaatcgttttgcaccactgttggtctgaaattagcgcctctgctgggacgtggtagtttcgctgaactgtcccagtacccaaacgatttcaaaagcctggtgaaccgttataatgaattggttgatacggtcggcctggagatggccaataaacacgtctttggtccgcaagcgtcttctgaagaaggcctggcagaaggctacgttcttaaacccgtctatccgcgcttctttaatgtgggtacgcgcgtggcgattaaatgcaagaactccaaattttcggagaaagcctttctgattgaaccaattaaagcgaaggttgaactgacggagaacgataaacgtctgctcggaatctttagcgaatatgttacctggaaccgcgtcagtaacgtactgtcacatattggctcagtgaccgccaaagattttgtccgtgtttcgggtctgacgatgaaagacatcattcgcgaagcagcacgcgaaggccatgatctgttgttcgctgataacccgtcggcggtgctgaaggagctgacaggcctcatccagaacacgattcgctccaaatggcacgaagttctggag

SEQ ID NO: 2888 - protein, 346 aa, synthetic construct
  REGION 1..346: note = variant of RNA ligase 2 from Klebsiella phage KP179
MHHHHHHGGSNMFAYYSSLENHTNAKFISKIRGAGFLSHTVEWVAREKIHGTNFSVIITPTEIVPAKRTGPILEDESFFGHEIIMKKYMDSFKKVQAMLNAMDLVSVQIFGEFAGGGIQKGFDYGDKDFYVFDILSDSGNEKSYWDDYRVESFCTTVGLKLAPLLGRGSFAELSQYPNDFKSLVNRYNELVDTVGLEMANKHVFGPQASSEEGLAEGYVLKPVYPRFFNVGTRVAIKCKNSKFSEKAFLIEPIKAKVELTENDKRLLGIFSEYVTWNRVSNVLSHIGSVTAKDFVRVSGLTMKDIIREAAREGHDLLFADNPSAVLKELTGLIQNTIRSKWHEVLE

SEQ ID NO: 2889 - DNA, 1038 bp, synthetic construct
  misc_feature 1..1038: note = variant of RNA ligase 2 from Klebsiella phage KP179
  source 1..1038: mol_type = other DNA
atgcatcaccatcaccatcacggtggcagcaacatgtttgcgtattattcaagtctggaaaaccataccaatgccaagttcattagcaagatccgtggtgcaggcttcctgagccacaccgtggaatgggtagctcgcgagaagattcatggaacgaactttagcgttatcattactccgaccgaaatcgtgccggccaaacgcacagggccgatcttggaagacgagagcttctttggtcatgaaattatcatgaaaaaatatatggactccttcaaaaaggtgcagaacatgctgaatgcgatggatcttgttagcgtgcaaatctttggcgaatttgcgggtggtggcattttgaaaggctttgattacggagacaaagatttctatgtgtttgacatcctgtctgatagcgggaacgagaaaagctactgggatgactatcgcgtcgaatcgttttgcaccactgttggtctgaaattagcgcctctgctgggacgtggtagtttcgctgaactgtcccagtacccaaacgatttcaaaagcctggtgaaccgttataatgaattggttgatacggtcggcctggagatggccaataaacacgtctttggtccgcaagcgtcttctgaagaaggcctggcagaaggctacgttcttaaacccgtctatccgcgcttctttaatgtgggtacgcgcgtggcgattaaatgcaagaactccaaattttcggagaaagcctttctgattgaaccaattaaagcgaaggttgaactgacggagaacgataaacgtctgctcggaatctttagcgaatatgttacctggaaccgcgtcagtaacgtactgtcacatattggctcagtgaccgccaaagattttgtccgtgtttcgggtctgacgatgaaagacatcattcgcgaagcagcacgcgaaggccatgatctgttgttcgctgataacccgtcggcggtgctgaaggagctgacaggcctcatccagaacacgattcgctccaaatggcacgaagttctggag

SEQ ID NO: 2890 - protein, 346 aa, synthetic construct
  REGION 1..346: note = variant of RNA ligase 2 from Klebsiella phage KP179
MHHHHHHGGSNMFAYYSSLENHTNAKFISKIRGAGFLSHTVEWVAREKIHGTNFSVIITPTEIVPAKRTGPILEDESFFGHEIIMKKYMDSFKKVQNMLNAMDLVSVQIFGEFAGGGILKGFDYGDKDFYVFDILSDSGNEKSYWDDYRVESFCTTVGLKLAPLLGRGSFAELSQYPNDFKSLVNRYNELVDTVGLEMANKHVFGPQASSEEGLAEGYVLKPVYPRFFNVGTRVAIKCKNSKFSEKAFLIEPIKAKVELTENDKRLLGIFSEYVTWNRVSNVLSHIGSVTAKDFVRVSGLTMKDIIREAAREGHDLLFADNPSAVLKELTGLIQNTIRSKWHEVLE

SEQ ID NO: 2891 - DNA, 1038 bp, synthetic construct
  misc_feature 1..1038: note = variant of RNA ligase 2 from Klebsiella phage KP179
  source 1..1038: mol_type = other DNA
atgcatcaccatcaccatcacggtggcagcaacatgtttgcgtattattcaagtctggaaaaccataccaatgccaagttcattagcaagatccgtggtgcaggcttcctgagccacaccgtggaatgggtagctcgcgagaagattcatggaacgaactttagcgttatcattactccgaccgaaatcgtgccggccaaacgcacagggccgatcttggaagacgagagcttctttggtcatgaaattatcatgaaaaaatatatggactccttcaaaaaggtgcagaacatgctgaatgcgatggatcttgttagcgtgcaaatctttggcgaatttgcgggtggtggcattcagaaaggctttgattacggagacaaagatttctatgtgtttgacatcctgtctgatagcgggaacgagaaaagctactgggatgactatcgcgtcgaatcgttttgcaccactgttggtctgaaattagcgcctctgctgggacgtggtagtttcgctgaactgtcccagtacccaaacgatttcaaaagcctggtgaaccgttataatgaattggttgatacggtcggcctggagatggccaataaacacgtctttggtccgcaagcgtcttctgaagaaggcctggcagaaggctacgttcttaaacccgtctatccgcgcttctttaatgtgggtacgcgcgtggcgattaaatgcaagaactccaaattttcggagaaagcctttctgattgaaccaattaaagcgaaggttgaactgacggagaacgataaagcgctgctcggaatctttagcgaatatgttacctggaaccgcgtcagtaacgtactgtcacatattggctcagtgaccgccaaagattttgtccgtgtttcgggtctgacgatgaaagacatcattcgcgaagcagcacgcgaaggccatgatctgttgttcgctgataacccgtcggcggtgctgaaggagctgacaggcctcatccagaacacgattcgctccaaatggcacgaagttctggag

SEQ ID NO: 2892 - protein, 346 aa, synthetic construct
  REGION 1..346: note = variant of RNA ligase 2 from Klebsiella phage KP179
MHHHHHHGGSNMFAYYSSLENHTNAKFISKIRGAGFLSHTVEWVAREKIHGTNFSVIITPTEIVPAKRTGPILEDESFFGHEIIMKKYMDSFKKVQNMLNAMDLVSVQIFGEFAGGGIQKGFDYGDKDFYVFDILSDSGNEKSYWDDYRVESFCTTVGLKLAPLLGRGSFAELSQYPNDFKSLVNRYNELVDTVGLEMANKHVFGPQASSEEGLAEGYVLKPVYPRFFNVGTRVAIKCKNSKFSEKAFLIEPIKAKVELTENDKALLGIFSEYVTWNRVSNVLSHIGSVTAKDFVRVSGLTMKDIIREAAREGHDLLFADNPSAVLKELTGLIQNTIRSKWHEVLE

SEQ ID NO: 2893 - DNA, 1038 bp, synthetic construct
  misc_feature 1..1038: note = variant of RNA ligase 2 from Klebsiella phage KP179
  source 1..1038: mol_type = other DNA
atgcatcaccatcaccatcacggtggcagcaacatgtttgcgtattattcaagtctggaaaaccataccaatgccaagttcattagcaagatccgtggtgcaggcttcctgagccacaccgtggaatgggtagctcgcgagaagattcatggaacgaactttagcgttatcattactccgaccgaaatcgtgccggccaaacgcacagggccgatcttggaagacgagagcttctttggtcatgaaattatcatgaaaaaatatatggactccttcaaaaaggtgcagaacatgctgaatgcgatggatcttgttagcgtgcaaatctttggcgaatttgcgggtggtggcattcagaaaggctttgattacggagacaaagatttctatgtgtttgacatcctgtctgatagcgggaacgagaaaagctactgggatgactatcgcgtcgaatcgttttgcaccactgttggtctgaaattagcgcctctgctgggacgtggtagtttcgctgaactgtcccagtacccaaacgatttcaaaagcctggtgaaccgttataatgaattggttgatacggtcggcctggagatggccaataaacacgtctttggtccgcaagcgtcttctgaagaaggcctggcagaaggctacgttcttaaacccgtctatccgcgcttctttaatgtgggtacgcgcgtggcgattaaatgcaagaactccaaattttcggagaaagcctttctgattgaaccaattaaagcgaaggttgaactgacggagaacgataaacgtctgctcggaatctttagcgaatatgttacctggaaccgcgtcagtaacgtactgtcacatattggctcagtgaccgccaaagattttgtcgaggtttcgggtctgacgatgaaagacatcattcgcgaagcagcacgcgaaggccatgatctgttgttcgctgataacccgtcggcggtgctgaaggagctgacaggcctcatccagaacacgattcgctccaaatggcacgaagttctggag

SEQ ID NO: 2894 - protein, 346 aa, synthetic construct
  REGION 1..346: note = variant of RNA ligase 2 from Klebsiella phage KP179
MHHHHHHGGSNMFAYYSSLENHTNAKFISKIRGAGFLSHTVEWVAREKIHGTNFSVIITPTEIVPAKRTGPILEDESFFGHEIIMKKYMDSFKKVQNMLNAMDLVSVQIFGEFAGGGIQKGFDYGDKDFYVFDILSDSGNEKSYWDDYRVESFCTTVGLKLAPLLGRGSFAELSQYPNDFKSLVNRYNELVDTVGLEMANKHVFGPQASSEEGLAEGYVLKPVYPRFFNVGTRVAIKCKNSKFSEKAFLIEPIKAKVELTENDKRLLGIFSEYVTWNRVSNVLSHIGSVTAKDFVEVSGLTMKDIIREAAREGHDLLFADNPSAVLKELTGLIQNTIRSKWHEVLE

SEQ ID NO: 2895 - DNA, 1038 bp, synthetic construct
  misc_feature 1..1038: note = variant of RNA ligase 2 from Klebsiella phage KP179
  source 1..1038: mol_type = other DNA
atgcatcaccatcaccatcacggtggcagcaacatgtttgcgtattattcaagtctggaaaaccataccaatgccaagttcattagcaagatccgtggtgcaggcttcctgagccacaccgtggaatgggtagctcgcgagaagattcatggaacgaactttagcgttatcattactccgaccgaaatcgtgccggccaaacgcacagggccgatcttggaagacgagagcttctttggtcatgaaattatcatgaaaaaatatatggactccttcaaaaaggtgcagaacatgctgaatgcgatggatcttgttagcgtgcaaatctttggcgaatttgcgggtggtggcattcagaaaggctttgattacggagacaaagatttctatgtgtttgacatcctgtctgatagcgggaacgagaaaagctactgggatgactatcgcgtcgaatcgttttgcaccactgttggtctgaaattagcgcctctgctgggacgtggtagtttcgctgaactgtcccagtacccaaacgatttcaaaagcctggtgaaccgttataatgaattggttgatacggtcggcctggagatggccaataaacacgtctttggtccgcaagcgtcttctgaagaaggcctggcagaaggctacgttcttaaacccgtctatccgcgcttctttaatgtgggtacgcgcgtggcgattaaatgcaagaactccaaattttcggagaaagcctttctgattgaaccaattaaagcgaaggttgaactgacggagaacgataaacgtctgctcggaatctttagcgaatatgttacctggaaccgcgtcagtaacgtactgtcacatattggctcagtgaccgccaaagattttgtccttgtttcgggtctgacgatgaaagacatcattcgcgaagcagcacgcgaaggccatgatctgttgttcgctgataacccgtcggcggtgctgaaggagctgacaggcctcatccagaacacgattcgctccaaatggcacgaagttctggag

SEQ ID NO: 2896 - protein, 346 aa, synthetic construct
  REGION 1..346: note = variant of RNA ligase 2 from Klebsiella phage KP179
MHHHHHHGGSNMFAYYSSLENHTNAKFISKIRGAGFLSHTVEWVAREKIHGTNFSVIITPTEIVPAKRTGPILEDESFFGHEIIMKKYMDSFKKVQNMLNAMDLVSVQIFGEFAGGGIQKGFDYGDKDFYVFDILSDSGNEKSYWDDYRVESFCTTVGLKLAPLLGRGSFAELSQYPNDFKSLVNRYNELVDTVGLEMANKHVFGPQASSEEGLAEGYVLKPVYPRFFNVGTRVAIKCKNSKFSEKAFLIEPIKAKVELTENDKRLLGIFSEYVTWNRVSNVLSHIGSVTAKDFVLVSGLTMKDIIREAAREGHDLLFADNPSAVLKELTGLIQNTIRSKWHEVLE

SEQ ID NO: 2897 - DNA, 1038 bp, synthetic construct
  misc_feature 1..1038: note = variant of RNA ligase 2 from Klebsiella phage KP179
  source 1..1038: mol_type = other DNA
atgcatcaccatcaccatcacggtggcagcaacatgtttgcgtattattcaagtctggaaaaccataccaatgccaagttcattagcaagatccgtggtgcaggcttcctgagccacaccgtggaatgggtagctcgcgagaagattcatggaacgaactttagcgttatcattactccgaccgaaatcgtgccggccaaacgcacagggccgatcttggaagacgagagcttctttggtcatgaaattatcatgaaaaaatatatggactccttcaaaaaggtgcagaacatgctgaatgcgatggatcttgttagcgtgcaaatctttggcgaatttgcgggtggtggcattcagaaaggctttgattacggagacaaagatttctatgtgtttgacatcctgtctgatagcgggaacgagaaaagctactgggatgactatcgcgtcgaatcgttttgcaccactgttggtctgaaattagcgcctctgctgggacgtggtagtttcgctgaactgtcccagtacccaaacgatttcaaaagcctggtgaaccgttataatgaattggttgatacggtcggcctggagatggccaataaacacgtctttggtccgcaagcgtcttctgaagaaggcctggcagaaggctacgttcttaaacccgtctatccgcgcttctttaatgtgggtacgcgcgtggcgattaaatgcaagaactccaaattttcggagaaagcctttctgattgaaccaattaaagcgaaggttgaactgacggagaacgataaacgtctgctcggaatctttagcgaatatgttacctggaaccgcgtcagtaacgtactgtcacatattggctcagtgaccgccaaagattttgtccaggtttcgggtctgacgatgaaagacatcattcgcgaagcagcacgcgaaggccatgatctgttgttcgctgataacccgtcggcggtgctgaaggagctgacaggcctcatccagaacacgattcgctccaaatggcacgaagttctggag

SEQ ID NO: 2898 - protein, 346 aa, synthetic construct
  REGION 1..346: note = variant of RNA ligase 2 from Klebsiella phage KP179
MHHHHHHGGSNMFAYYSSLENHTNAKFISKIRGAGFLSHTVEWVAREKIHGTNFSVIITPTEIVPAKRTGPILEDESFFGHEIIMKKYMDSFKKVQNMLNAMDLVSVQIFGEFAGGGIQKGFDYGDKDFYVFDILSDSGNEKSYWDDYRVESFCTTVGLKLAPLLGRGSFAELSQYPNDFKSLVNRYNELVDTVGLEMANKHVFGPQASSEEGLAEGYVLKPVYPRFFNVGTRVAIKCKNSKFSEKAFLIEPIKAKVELTENDKRLLGIFSEYVTWNRVSNVLSHIGSVTAKDFVQVSGLTMKDIIREAAREGHDLLFADNPSAVLKELTGLIQNTIRSKWHEVLE

SEQ ID NO: 2899 - DNA, 1038 bp, synthetic construct
  misc_feature 1..1038: note = variant of RNA ligase 2 from Klebsiella phage KP179
  source 1..1038: mol_type = other DNA
atgcatcaccatcaccatcacggtggcagcaacatgtttgcgtattattcaagtctggaaaaccataccaatgccaagttcattagcaagatcgagggtgcaggcttcctgagccacaccgtggaatgggtagctcgcgagaagattcatggaacgaactttagcgttatcattactccgaccgaaatcgtgccggccaaacgcacagggccgatcttggaagacgagagcttctttggtcatgaaattatcatgaaaaaatatatggactccttcaaaaaggtgcagaacatgctgaatgcgatggatcttgttagcgtgcaaatctttggcgaatttgcgggtggtggcattcagaaaggctttgattacggagacaaagatttctatgtgtttgacatcctgtctgatagcgggaacgagaaaagctactgggatgactatcgcgtcgaatcgttttgcaccactgttggtctgaaattagcgcctctgctgggacgtggtagtttcgctgaactgtcccagtacccaaacgatttcaaaagcctggtgaaccgttataatgaattggttgatacggtcggcctggagatggccaataaacacgtctttggtccgcaagcgtcttctgaagaaggcctggcagaaggctacgttcttaaacccgtctatccgcgcttctttaatgtgggtacgcgcgtggcgattaaatgcaagaactccaaattttcggagaaagcctttctgattgaaccaattaaagcgaaggttgaactgacggagaacgataaacgtctgctcggaatctttagcgaatatgttacctggaaccgcgtcagtaacgtactgtcacatattggctcagtgaccgccaaagattttgtccgtgtttcgggtctgacgatgaaagacatcattcgcgaagcagcacgcgaaggccatgatctgttgttcgctgataacccgtcggcggtgctgaaggagctgacaggcctcatccagaacacgattcgctccaaatggcacgaagttctggag

SEQ ID NO: 2900 - protein, 346 aa, synthetic construct
  REGION 1..346: note = variant of RNA ligase 2 from Klebsiella phage KP179
MHHHHHHGGSNMFAYYSSLENHTNAKFISKIEGAGFLSHTVEWVAREKIHGTNFSVIITPTEIVPAKRTGPILEDESFFGHEIIMKKYMDSFKKVQNMLNAMDLVSVQIFGEFAGGGIQKGFDYGDKDFYVFDILSDSGNEKSYWDDYRVESFCTTVGLKLAPLLGRGSFAELSQYPNDFKSLVNRYNELVDTVGLEMANKHVFGPQASSEEGLAEGYVLKPVYPRFFNVGTRVAIKCKNSKFSEKAFLIEPIKAKVELTENDKRLLGIFSEYVTWNRVSNVLSHIGSVTAKDFVRVSGLTMKDIIREAAREGHDLLFADNPSAVLKELTGLIQNTIRSKWHEVLE

SEQ ID NO: 2901 - DNA, 1038 bp, synthetic construct
  misc_feature 1..1038: note = variant of RNA ligase 2 from Klebsiella phage KP179
  source 1..1038: mol_type = other DNA
atgcatcaccatcaccatcacggtggcagcaacatgtttgcgtattattcaagtctggaaaaccataccaatgccaagttcattagcaagatccgtggtgcaggcttcctgagccacaccgtggaatgggtagctcgcgagaagattcatggaacgaactttagcgttatcattactccgaccgaaatcgtgccggccaaacgcacagggccgatcttggaagacgagagcttctttggtcatgaaattatcatgaaaaaatatatggactccttcaaaaaggtgcagaacatgctgaatgcgatggatcttgttagcgtgcaaatctttggcgaatttgcgggtggtggcattcagaaaggctttgattacggagacaaagatttctatgtgtttgacatcctgtctgatagcgggaacgagaaaagctactgggatgactatcgcgtcgaatcgttttgcacccaggttggtctgaaattagcgcctctgctgggacgtggtagtttcgctgaactgtcccagtacccaaacgatttcaaaagcctggtgaaccgttataatgaattggttgatacggtcggcctggagatggccaataaacacgtctttggtccgcaagcgtcttctgaagaaggcctggcagaaggctacgttcttaaacccgtctatccgcgcttctttaatgtgggtacgcgcgtggcgattaaatgcaagaactccaaattttcggagaaagcctttctgattgaaccaattaaagcgaaggttgaactgacggagaacgataaacgtctgctcggaatctttagcgaatatgttacctggaaccgcgtcagtaacgtactgtcacatattggctcagtgaccgccaaagattttgtccgtgtttcgggtctgacgatgaaagacatcattcgcgaagcagcacgcgaaggccatgatctgttgttcgctgataacccgtcggcggtgctgaaggagctgacaggcctcatccagaacacgattcgctccaaatggcacgaagttctggag

SEQ ID NO: 2902 - protein, 346 aa, synthetic construct
  REGION 1..346: note = variant of RNA ligase 2 from Klebsiella phage KP179
MHHHHHHGGSNMFAYYSSLENHTNAKFISKIRGAGFLSHTVEWVAREKIHGTNFSVIITPTEIVPAKRTGPILEDESFFGHEIIMKKYMDSFKKVQNMLNAMDLVSVQIFGEFAGGGIQKGFDYGDKDFYVFDILSDSGNEKSYWDDYRVESFCTQVGLKLAPLLGRGSFAELSQYPNDFKSLVNRYNELVDTVGLEMANKHVFGPQASSEEGLAEGYVLKPVYPRFFNVGTRVAIKCKNSKFSEKAFLIEPIKAKVELTENDKRLLGIFSEYVTWNRVSNVLSHIGSVTAKDFVRVSGLTMKDIIREAAREGHDLLFADNPSAVLKELTGLIQNTIRSKWHEVLE

SEQ ID NO: 2903 - DNA, 1038 bp, synthetic construct
  misc_feature 1..1038: note = variant of RNA ligase 2 from Klebsiella phage KP179
  source 1..1038: mol_type = other DNA
atgcatcaccatcaccatcacggtggcagcaacatgtttgcgtattattcaagtctggaaaaccataccaatgccaagttcattagcaagatccgtggtgcaggcttcctgagccacattgtggaatgggtagctcgcgagaagattcatggaacgaactttagcgttatcattactccgaccgaaatcgtgccggccaaacgcacagggccgatcttggaagacgagagcttctttggtcatgaaattatcatgaaaaaatatatggactccttcaaaaaggtgcagaacatgctgaatgcgatggatcttgttagcgtgcaaatctttggcgaatttgcgggtggtggcattcagaaaggctttgattacggagacaaagatttctatgtgtttgacatcctgtctgatagcgggaacgagaaaagctactgggatgactatcgcgtcgaatcgttttgcaccactgttggtctgaaattagcgcctctgctgggacgtggtagtttcgctgaactgtcccagtacccaaacgatttcaaaagcctggtgaaccgttataatgaattggttgatacggtcggcctggagatggccaataaacacgtctttggtccgcaagcgtcttctgaagaaggcctggcagaaggctacgttcttaaacccgtctatccgcgcttctttaatgtgggtacgcgcgtggcgattaaatgcaagaactccaaattttcggagaaagcctttctgattgaaccaattaaagcgaaggttgaactgacggagaacgataaacgtctgctcggaatctttagcgaatatgttacctggaaccgcgtcagtaacgtactgtcacatattggctcagtgaccgccaaagattttgtccgtgtttcgggtctgacgatgaaagacatcattcgcgaagcagcacgcgaaggccatgatctgttgttcgctgataacccgtcggcggtgctgaaggagctgacaggcctcatccagaacacgattcgctccaaatggcacgaagttctggag

SEQ ID NO: 2904 - protein, 346 aa, synthetic construct
  REGION 1..346: note = variant of RNA ligase 2 from Klebsiella phage KP179
MHHHHHHGGSNMFAYYSSLENHTNAKFISKIRGAGFLSHIVEWVAREKIHGTNFSVIITPTEIVPAKRTGPILEDESFFGHEIIMKKYMDSFKKVQNMLNAMDLVSVQIFGEFAGGGIQKGFDYGDKDFYVFDILSDSGNEKSYWDDYRVESFCTTVGLKLAPLLGRGSFAELSQYPNDFKSLVNRYNELVDTVGLEMANKHVFGPQASSEEGLAEGYVLKPVYPRFFNVGTRVAIKCKNSKFSEKAFLIEPIKAKVELTENDKRLLGIFSEYVTWNRVSNVLSHIGSVTAKDFVRVSGLTMKDIIREAAREGHDLLFADNPSAVLKELTGLIQNTIRSKWHEVLE

SEQ ID NO: 2905 - DNA, 1038 bp, synthetic construct
  misc_feature 1..1038: note = variant of RNA ligase 2 from Klebsiella phage KP179
  source 1..1038: mol_type = other DNA
atgcatcaccatcaccatcacggtggcagcaacatgtttgcgtattattcaagtctggaaaaccataccaatgccaagttcattagcaagatccgtggtgcaggcttcctgagccacaccgtggaatgggtagctcgcgagaagattcatggaacgaactttagcgttatcattactccgaccgaaatcgtgccggccaaacgcacagggccgatcttggaagacgagagcttctttggtcatgaaattatcatgaaaaaatatatggactccttcaaaaaggtgcagaacatgctgaatgcgatggatcttttgagcgtgcaaatctttggcgaatttgcgggtggtggcattcagaaaggctttgattacggagacaaagatttctatgtgtttgacatcctgtctgatagcgggaacgagaaaagctactgggatgactatcgcgtcgaatcgttttgcaccactgttggtctgaaattagcgcctctgctgggacgtggtagtttcgctgaactgtcccagtacccaaacgatttcaaaagcctggtgaaccgttataatgaattggttgatacggtcggcctggagatggccaataaacacgtctttggtccgcaagcgtcttctgaagaaggcctggcagaaggctacgttcttaaacccgtctatccgcgcttctttaatgtgggtacgcgcgtggcgattaaatgcaagaactccaaattttcggagaaagcctttctgattgaaccaattaaagcgaaggttgaactgacggagaacgataaacgtctgctcggaatctttagcgaatatgttacctggaaccgcgtcagtaacgtactgtcacatattggctcagtgaccgccaaagattttgtccgtgtttcgggtctgacgatgaaagacatcattcgcgaagcagcacgcgaaggccatgatctgttgttcgctgataacccgtcggcggtgctgaaggagctgacaggcctcatccagaacacgattcgctccaaatggcacgaagttctggag

SEQ ID NO: 2906 - protein, 346 aa, synthetic construct
  REGION 1..346: note = variant of RNA ligase 2 from Klebsiella phage KP179
MHHHHHHGGSNMFAYYSSLENHTNAKFISKIRGAGFLSHTVEWVAREKIHGTNFSVIITPTEIVPAKRTGPILEDESFFGHEIIMKKYMDSFKKVQNMLNAMDLLSVQIFGEFAGGGIQKGFDYGDKDFYVFDILSDSGNEKSYWDDYRVESFCTTVGLKLAPLLGRGSFAELSQYPNDFKSLVNRYNELVDTVGLEMANKHVFGPQASSEEGLAEGYVLKPVYPRFFNVGTRVAIKCKNSKFSEKAFLIEPIKAKVELTENDKRLLGIFSEYVTWNRVSNVLSHIGSVTAKDFVRVSGLTMKDIIREAAREGHDLLFADNPSAVLKELTGLIQNTIRSKWHEVLE

SEQ ID NO: 2907 - DNA, 1038 bp, synthetic construct
  misc_feature 1..1038: note = variant of RNA ligase 2 from Klebsiella phage KP179
  source 1..1038: mol_type = other DNA
atgcatcaccatcaccatcacggtggcagcaacatgtttgcgtattattcaagtctggaaaaccataccaatgccaagttcattagcaagatccgtggtgcaggcttcctgagccacaccgtggaatgggtagctcgcgagaagattcatggaacgaactttagcgttatcattactccgaccgaaatcgtgccggccaaacgcacagggccgatcttggaagacgagagcttctttggtcatgaaattatcatgaaaaaatatatggactccttcaaaaaggtgcagaacatgctgaatgcgatggatcttgttagcatgcaaatctttggcgaatttgcgggtggtggcattcagaaaggctttgattacggagacaaagatttctatgtgtttgacatcctgtctgatagcgggaacgagaaaagctactgggatgactatcgcgtcgaatcgttttgcaccactgttggtctgaaattagcgcctctgctgggacgtggtagtttcgctgaactgtcccagtacccaaacgatttcaaaagcctggtgaaccgttataatgaattggttgatacggtcggcctggagatggccaataaacacgtctttggtccgcaagcgtcttctgaagaaggcctggcagaaggctacgttcttaaacccgtctatccgcgcttctttaatgtgggtacgcgcgtggcgattaaatgcaagaactccaaattttcggagaaagcctttctgattgaaccaattaaagcgaaggttgaactgacggagaacgataaacgtctgctcggaatctttagcgaatatgttacctggaaccgcgtcagtaacgtactgtcacatattggctcagtgaccgccaaagattttgtccgtgtttcgggtctgacgatgaaagacatcattcgcgaagcagcacgcgaaggccatgatctgttgttcgctgataacccgtcggcggtgctgaaggagctgacaggcctcatccagaacacgattcgctccaaatggcacgaagttctggag

SEQ ID NO: 2908 - protein, 346 aa, synthetic construct
  REGION 1..346: note = variant of RNA ligase 2 from Klebsiella phage KP179
MHHHHHHGGSNMFAYYSSLENHTNAKFISKIRGAGFLSHTVEWVAREKIHGTNFSVIITPTEIVPAKRTGPILEDESFFGHEIIMKKYMDSFKKVQNMLNAMDLVSMQIFGEFAGGGIQKGFDYGDKDFYVFDILSDSGNEKSYWDDYRVESFCTTVGLKLAPLLGRGSFAELSQYPNDFKSLVNRYNELVDTVGLEMANKHVFGPQASSEEGLAEGYVLKPVYPRFFNVGTRVAIKCKNSKFSEKAFLIEPIKAKVELTENDKRLLGIFSEYVTWNRVSNVLSHIGSVTAKDFVRVSGLTMKDIIREAAREGHDLLFADNPSAVLKELTGLIQNTIRSKWHEVLE

SEQ ID NO: 2909 - DNA, 1038 bp, synthetic construct
  misc_feature 1..1038: note = variant of RNA ligase 2 from Klebsiella phage KP179
  source 1..1038: mol_type = other DNA
atgcatcaccatcaccatcacggtggcagcaacatgtttgcgtattattcaagtctggaaaaccataccaatgccaagttcattagcaagatccgtggtgcaggcttcctgagccacaccgaggaatgggtagctcgcgagaagattcatggaacgaactttagcgttatcattactccgaccgaaatcgtgccggccaaacgcacagggccgatcttggaagacgagagcttctttggtcatgaaattatcatgaaaaaatatatggactccttcaaaaaggtgcagaacatgctgaatgcgatggatcttgttagcgtgcaaatctttggcgaatttgagggtggtggcattcagaaaggctttgattacggagacaaagatttctatgtgtttgacatcctgtctgatagcgggaacgagaaaagctactgggatgactatcgcgtcgaatcgttttgcaccactgttggtctgaaattagcgcctctgctgggacgtggtagtttcgctgaactgtcccagtacccaaacgatttcaaaagcctggtgaaccgttataatgaattggttgatacggtcggcctggagatggccaataaacacgtctttggtccgcaagcgtcttctgaagaaggcctggcagaaggctacgttcttaaacccgtctatccgcgcttctttaatgtgggtacgcgcgtggcgattaaatgcaagaactccaaattttcggagaaagcctttctgattgaaccaattaaagcgaaggttgaactgacggagaacgataaacgtctgctcggaatctttagcgaatatgttacctggaaccgcgtcagtaacgtactgtcacatattggctcagtgaccgccaaagattttgtccgtgtttcgggtctgacgatgaaagacatcattcgcgaagcagcacgcgaaggccatgatctgttgttcgctgataacccgtcggcggtgctgaaggagctgacaggcctcatccagaacacgattcgctccaaatggcacgaagttctggag

SEQ ID NO: 2910 - protein, 346 aa, synthetic construct
  REGION 1..346: note = variant of RNA ligase 2 from Klebsiella phage KP179
MHHHHHHGGSNMFAYYSSLENHTNAKFISKIRGAGFLSHTEEWVAREKIHGTNFSVIITPTEIVPAKRTGPILEDESFFGHEIIMKKYMDSFKKVQNMLNAMDLVSVQIFGEFEGGGIQKGFDYGDKDFYVFDILSDSGNEKSYWDDYRVESFCTTVGLKLAPLLGRGSFAELSQYPNDFKSLVNRYNELVDTVGLEMANKHVFGPQASSEEGLAEGYVLKPVYPRFFNVGTRVAIKCKNSKFSEKAFLIEPIKAKVELTENDKRLLGIFSEYVTWNRVSNVLSHIGSVTAKDFVRVSGLTMKDIIREAAREGHDLLFADNPSAVLKELTGLIQNTIRSKWHEVLE

SEQ ID NO: 2911 - DNA, 1038 bp, synthetic construct
  misc_feature 1..1038: note = variant of RNA ligase 2 from Klebsiella phage KP179
  source 1..1038: mol_type = other DNA
atgcatcaccatcaccatcacggtggcagcaacatgtttgcgtattattcaagtctggaaaaccataccaatgccaagttcattagcaagatccgtggtgcaggcttcctgagccacaccattgaatgggtagctcgcgagaagattcatggaacgaactttagcgttatcattactccgaccgaaatcgtgccggccaaacgcacagggccgatcttggaagacgagagcttctttggtcatgaaattatcatgaaaaaatatatggactccttcaaaaaggtgcagaacatgctgaatgcgatggatcttgttagcgtgcaaatctttggcgaatttgcgggtggtggcattcagaaaggctttgattacggagacaaagatttctatgtgtttgacatcctgtctgatagcgggaacgagaaaagctactgggatgactatcgcgtcgaatcgttttgcaccactgttggtctgaaattagcgcctctgctgggacgtggtagtttcgctgaactgtcccagtacccaaacgatttcaaaagcctggtgaaccgttataatgaattggttgatacggtcggcctggagatggccaataaacacgtctttggtccgcaagcgtcttctgaagaaggcctggcagaaggctacgttcttaaacccgtctatccgcgcttctttaatgtgggtacgcgcgtggcgattaaatgcaagaactccaaattttcggagaaagcctttctgattgaaccaattaaagcgaaggttgaactgacggagaacgataaacgtctgctcggaatctttagcgaatatgttacctggaaccgcgtcagtaacgtactgtcacatattggctcagtgaccgccaaagattttgtccgtgtttcgggtctgacgatgaaagacatcattcgcgaagcagcacgcgaaggccatgatctgttgttcgctgataacccgtcggcggtgctgaaggagctgacaggcctcatccagaacacgattcgctccaaatggcacgaagttctggag

SEQ ID NO: 2912 - protein, 346 aa, synthetic construct
  REGION 1..346: note = variant of RNA ligase 2 from Klebsiella phage KP179
MHHHHHHGGSNMFAYYSSLENHTNAKFISKIRGAGFLSHTIEWVAREKIHGTNFSVIITPTEIVPAKRTGPILEDESFFGHEIIMKKYMDSFKKVQNMLNAMDLVSVQIFGEFAGGGIQKGFDYGDKDFYVFDILSDSGNEKSYWDDYRVESFCTTVGLKLAPLLGRGSFAELSQYPNDFKSLVNRYNELVDTVGLEMANKHVFGPQASSEEGLAEGYVLKPVYPRFFNVGTRVAIKCKNSKFSEKAFLIEPIKAKVELTENDKRLLGIFSEYVTWNRVSNVLSHIGSVTAKDFVRVSGLTMKDIIREAAREGHDLLFADNPSAVLKELTGLIQNTIRSKWHEVLE

SEQ ID NO: 2913 - DNA, 1038 bp, synthetic construct
  misc_feature 1..1038: note = variant of RNA ligase 2 from Klebsiella phage KP179
  source 1..1038: mol_type = other DNA
atgcatcaccatcaccatcacggtggcagcaacatgtttgcgtattattcaagtctggaaaaccataccaatgccaagttcattagcaagatccgtggtgcaggcttcctgagccacaccgtggaatgggtagctcgcgagaagattcatggaacgaactttagcgttatcattactccgaccgaaatcgctccggccaaacgcacagggccgatcttggaagacgagagcttctttggtcatgaaattatcatgaaaaaatatatggactccttcaaaaaggtgcagaacatgctgaatgcgatggatcttgttagcgtgcaaatctttggcgaatttgcgggtggtggcattcagaaaggctttgattacggagacaaagatttctatgtgtttgacatcctgtctgatagcgggaacgagaaaagctactgggatgactatcgcgtcgaatcgttttgcaccactgttggtctgaaattagcgcctctgctgggacgtggtagtttcgctgaactgtcccagtacccaaacgatttcaaaagcctggtgaaccgttataatgaattggttgatacggtcggcctggagatggccaataaacacgtctttggtccgcaagcgtcttctgaagaaggcctggcagaaggctacgttcttaaacccgtctatccgcgcttctttaatgtgggtacgcgcgtggcgattaaatgcaagaactccaaattttcggagaaagcctttctgattgaaccaattaaagcgaaggttgaactgacggagaacgataaacgtctgctcggaatctttagcgaatatgttacctggaaccgcgtcagtaacgtactgtcacatattggctcagtgaccgccaaagattttgtccgtgtttcgggtctgacgatgaaagacatcattcgcgaagcagcacgcgaaggccatgatctgttgttcgctgataacccgtcggcggtgctgaaggagctgacaggcctcatccagaacacgattcgctccaaatggcacgaagttctggag

SEQ ID NO: 2914 - protein, 346 aa, synthetic construct
  REGION 1..346: note = variant of RNA ligase 2 from Klebsiella phage KP179
MHHHHHHGGSNMFAYYSSLENHTNAKFISKIRGAGFLSHTVEWVAREKIHGTNFSVIITPTEIAPAKRTGPILEDESFFGHEIIMKKYMDSFKKVQNMLNAMDLVSVQIFGEFAGGGIQKGFDYGDKDFYVFDILSDSGNEKSYWDDYRVESFCTTVGLKLAPLLGRGSFAELSQYPNDFKSLVNRYNELVDTVGLEMANKHVFGPQASSEEGLAEGYVLKPVYPRFFNVGTRVAIKCKNSKFSEKAFLIEPIKAKVELTENDKRLLGIFSEYVTWNRVSNVLSHIGSVTAKDFVRVSGLTMKDIIREAAREGHDLLFADNPSAVLKELTGLIQNTIRSKWHEVLE

SEQ ID NO: 2915 - DNA, 1038 bp, synthetic construct
  misc_feature 1..1038: note = variant of RNA ligase 2 from Klebsiella phage KP179
  source 1..1038: mol_type = other DNA
atgcatcaccatcaccatcacggtggcagcaacatgtttgcgtattattcaagtctggaaaaccataccaatgccaagttcattagcaagatccgtggtgcaggcttcctgagccacaccgtggaatgggtagctcgcgagaagattcatggaacgaactttagcgttatcattactccgaccgaaatcgtgccggccaaacgcacagggccgatcttggaagacgagagcttctttggtcatgaaattatcatgaaaaaatatatggactccttcaaaaaggtgcagaacatgctgaatgcgatggatcttgttagcgtgcaaatctttggcgaatttgcgggtggtggcattcagaaaggctttgattacggagacaaagatttctatgtgtttgacatcctgtctgatagcgggaacgagaaaagctactgggatgactatcgcgtcgaatcgttttgcaccactgttggtctgaaattatgtcctctgctgggacgtggtagtttcgctgaactgtcccagtacccaaacgatttcaaaagcctggtgaaccgttataatgaattggttgatacggtcggcctggagatggccaataaacacgtctttggtccgcaagcgtcttctgaagaaggcctggcagaaggctacgttcttaaacccgtctatccgcgcttctttaatgtgggtacgcgcgtggcgattaaatgcaagaactccaaattttcggagaaagcctttctgattgaaccaattaaagcgaaggttgaactgacggagaacgataaacgtctgctcggaatctttagcgaatatgttacctggaaccgcgtcagtaacgtactgtcacatattggctcagtgaccgccaaagattttgtccgtgtttcgggtctgacgatgaaagacatcattcgcgaagcagcacgcgaaggccatgatctgttgttcgctgataacccgtcggcggtgctgaaggagctgacaggcctcatccagaacacgattcgctccaaatggcacgaagttctggag

SEQ ID NO: 2916 - protein, 346 aa, synthetic construct
  REGION 1..346: note = variant of RNA ligase 2 from Klebsiella phage KP179
MHHHHHHGGSNMFAYYSSLENHTNAKFISKIRGAGFLSHTVEWVAREKIHGTNFSVIITPTEIVPAKRTGPILEDESFFGHEIIMKKYMDSFKKVQNMLNAMDLVSVQIFGEFAGGGIQKGFDYGDKDFYVFDILSDSGNEKSYWDDYRVESFCTTVGLKLCPLLGRGSFAELSQYPNDFKSLVNRYNELVDTVGLEMANKHVFGPQASSEEGLAEGYVLKPVYPRFFNVGTRVAIKCKNSKFSEKAFLIEPIKAKVELTENDKRLLGIFSEYVTWNRVSNVLSHIGSVTAKDFVRVSGLTMKDIIREAAREGHDLLFADNPSAVLKELTGLIQNTIRSKWHEVLE

SEQ ID NO: 2917 - DNA, 1038 bp, synthetic construct
  misc_feature 1..1038: note = variant of RNA ligase 2 from Klebsiella phage KP179
  source 1..1038: mol_type = other DNA
atgcatcaccatcaccatcacggtggcagcaacatgtttgcgtattattcaagtctggaaaaccataccaatgccaagttcattagcaagatccgtggtgcaggcttcctgagccacaccgtggaatgggtagctcgcgagaagattcatggaacgaactttagcgttatcattactccgaccgaaatcgtgccggccaaacgcacagggccgatcttggaagacgagagcttctttggtcatgaaattatcatgaaaaaatatatggactccttcaaaaaggtgcagaacatgctgaatgcgatggatcttgttagcgtgcaaatctttggcgaatttgcgggtggtggcattcagaaaggctttgattacggagacaaagatttctatgtgtttgacatcctgtctgatagcgggaacgagaaaagctactgggatgactatcgcgtcgaatcgttttgcaccactgttggtctgaaattagcgcctctgctgggacgtggtagtttcgctgaactgtcccagtacccaaacgatttcaaaagcctggtgaaccgttataatgaattggttgatacggtcggcctggagatggccaataaacacgtctttggtccgcaactgtcttctgaagaaggcctggcagaaggctacgttcttaaacccgtctatccgcgcttctttaatgtgggtacgcgcgtggcgattaaatgcaagaactccaaattttcggagaaagcctttctgattgaaccaattaaagcgaaggttgaactgacggagaacgataaacgtctgctcggaatctttagcgaatatgttacctggaaccgcgtcagtaacgtactgtcacatattggctcagtgaccgccaaagattttgtccgtgtttcgggtctgacgatgaaagacatcattcgcgaagcagcacgcgaaggccatgatctgttgttcgctgataacccgtcggcggtgctgaaggagctgacaggcctcatccagaacacgattcgctccaaatggcacgaagttctggag

SEQ ID NO: 2918 - protein, 346 aa, synthetic construct
  REGION 1..346: note = variant of RNA ligase 2 from Klebsiella phage KP179
MHHHHHHGGSNMFAYYSSLENHTNAKFISKIRGAGFLSHTVEWVAREKIHGTNFSVIITPTEIVPAKRTGPILEDESFFGHEIIMKKYMDSFKKVQNMLNAMDLVSVQIFGEFAGGGIQKGFDYGDKDFYVFDILSDSGNEKSYWDDYRVESFCTTVGLKLAPLLGRGSFAELSQYPNDFKSLVNRYNELVDTVGLEMANKHVFGPQLSSEEGLAEGYVLKPVYPRFFNVGTRVAIKCKNSKFSEKAFLIEPIKAKVELTENDKRLLGIFSEYVTWNRVSNVLSHIGSVTAKDFVRVSGLTMKDIIREAAREGHDLLFADNPSAVLKELTGLIQNTIRSKWHEVLE

SEQ ID NO: 2919 - DNA, 1038 bp, synthetic construct
  misc_feature 1..1038: note = variant of RNA ligase 2 from Klebsiella phage KP179
  source 1..1038: mol_type = other DNA
atgcatcaccatcaccatcacggtggcagcaacatgtttgcgtattattcaagtctggaaaaccataccaatgataagttcattagcaagatccgtggtgcaggcttcctgagccacaccgtggaatgggtagctcgcgagaagattcatggaacgaactttagcgttatcattactccgaccgaaatcgtgccggccaaacgcacagggccgatcttggaagacgagagcttctttggtcatgaaattatcatgaaaaaatatatggactccttcaaaaaggtgcagaacatgctgaatgcgatggatcttgttagcgtgcaaatctttggcgaatttgcgggtggtggcattcagaaaggctttgattacggagacaaagatttctatgtgtttgacatcctgtctgatagcgggaacgagaaaagctactgggatgactatcgcgtcgaatcgttttgcaccactgttggtctgaaattagcgcctctgctgggacgtggtagtttcgctgaactgtcccagtacccaaacgatttcaaaagcctggtgaaccgttataatgaattggttgatacggtcggcctggagatggccaataaacacgtctttggtccgcaagcgtcttctgaagaaggcctggcagaaggctacgttcttaaacccgtctatccgcgcttctttaatgtgggtacgcgcgtggcgattaaatgcaagaactccaaattttcggagaaagcctttctgattgaaccaattaaagcgaaggttgaactgacggagaacgataaacgtctgctcggaatctttagcgaatatgttacctggaaccgcgtcagtaacgtactgtcacatattggctcagtgaccgccaaagattttgtccgtgtttcgggtctgacgatgaaagacatcattcgcgaagcagcacgcgaaggccatgatctgttgttcgctgataacccgtcggcggtgctgaaggagctgacaggcctcatccagaacacgattcgctccaaatggcacgaagttctggag

SEQ ID NO: 2920 - protein, 346 aa, synthetic construct
  REGION 1..346: note = variant of RNA ligase 2 from Klebsiella phage KP179
MHHHHHHGGSNMFAYYSSLENHTNDKFISKIRGAGFLSHTVEWVAREKIHGTNFSVIITPTEIVPAKRTGPILEDESFFGHEIIMKKYMDSFKKVQNMLNAMDLVSVQIFGEFAGGGIQKGFDYGDKDFYVFDILSDSGNEKSYWDDYRVESFCTTVGLKLAPLLGRGSFAELSQYPNDFKSLVNRYNELVDTVGLEMANKHVFGPQASSEEGLAEGYVLKPVYPRFFNVGTRVAIKCKNSKFSEKAFLIEPIKAKVELTENDKRLLGIFSEYVTWNRVSNVLSHIGSVTAKDFVRVSGLTMKDIIREAAREGHDLLFADNPSAVLKELTGLIQNTIRSKWHEVLE

SEQ ID NO: 2921 - DNA, 1038 bp, synthetic construct
  misc_feature 1..1038: note = variant of RNA ligase 2 from Klebsiella phage KP179
  source 1..1038: mol_type = other DNA
atgcatcaccatcaccatcacggtggcagcaacatgtttgcgtattattcaagtctggaaaaccataccaattttaagttcattagcaagatccgtggtgcaggcttcctgagccacaccgtggaatgggtagctcgcgagaagattcatggaacgaactttagcgttatcattactccgaccgaaatcgtgccggccaaacgcacagggccgatcttggaagacgagagcttctttggtcatgaaattatcatgaaaaaatatatggactccttcaaaaaggtgcagaacatgctgaatgcgatggatcttgttagcgtgcaaatctttggcgaatttgcgggtggtggcattcagaaaggctttgattacggagacaaagatttctatgtgtttgacatcctgtctgatagcgggaacgagaaaagctactgggatgactatcgcgtcgaatcgttttgcaccactgttggtctgaaattagcgcctctgctgggacgtggtagtttcgctgaactgtcccagtacccaaacgatttcaaaagcctggtgaaccgttataatgaattggttgatacggtcggcctggagatggccaataaacacgtctttggtccgcaagcgtcttctgaagaaggcctggcagaaggctacgttcttaaacccgtctatccgcgcttctttaatgtgggtacgcgcgtggcgattaaatgcaagaactccaaattttcggagaaagcctttctgattgaaccaattaaagcgaaggttgaactgacggagaacgataaacgtctgctcggaatctttagcgaatatgttacctggaaccgcgtcagtaacgtactgtcacatattggctcagtgaccgccaaagattttgtccgtgtttcgggtctgacgatgaaagacatcattcgcgaagcagcacgcgaaggccatgatctgttgttcgctgataacccgtcggcggtgctgaaggagctgacaggcctcatccagaacacgattcgctccaaatggcacgaagttctggag

SEQ ID NO: 2922 - protein, 346 aa, synthetic construct
  REGION 1..346: note = variant of RNA ligase 2 from Klebsiella phage KP179
MHHHHHHGGSNMFAYYSSLENHTNFKFISKIRGAGFLSHTVEWVAREKIHGTNFSVIITPTEIVPAKRTGPILEDESFFGHEIIMKKYMDSFKKVQNMLNAMDLVSVQIFGEFAGGGIQKGFDYGDKDFYVFDILSDSGNEKSYWDDYRVESFCTTVGLKLAPLLGRGSFAELSQYPNDFKSLVNRYNELVDTVGLEMANKHVFGPQASSEEGLAEGYVLKPVYPRFFNVGTRVAIKCKNSKFSEKAFLIEPIKAKVELTENDKRLLGIFSEYVTWNRVSNVLSHIGSVTAKDFVRVSGLTMKDIIREAAREGHDLLFADNPSAVLKELTGLIQNTIRSKWHEVLE

SEQ ID NO: 2923 - DNA, 1038 bp, synthetic construct
  misc_feature 1..1038: note = variant of RNA ligase 2 from Klebsiella phage KP179
  source 1..1038: mol_type = other DNA
atgcatcaccatcaccatcacggtggcagcaacatgtttgcgtattattcaagtctggaaaaccataccaatacgaagttcattagcaagatccgtggtgcaggcttcctgagccacaccgtggaatgggtagctcgcgagaagattcatggaacgaactttagcgttatcattactccgaccgaaatcgtgccggccaaacgcacagggccgatcttggaagacgagagcttctttggtcatgaaattatcatgaaaaaatatatggactccttcaaaaaggtgcagaacatgctgaatgcgatggatcttgttagcgtgcaaatctttggcgaatttgcgggtggtggcattcagaaaggctttgattacggagacaaagatttctatgtgtttgacatcctgtctgatagcgggaacgagaaaagctactgggatgactatcgcgtcgaatcgttttgcaccactgttggtctgaaattagcgcctctgctgggacgtggtagtttcgctgaactgtcccagtacccaaacgatttcaaaagcctggtgaaccgttataatgaattggttgatacggtcggcctggagatggccaataaacacgtctttggtccgcaagcgtcttctgaagaaggcctggcagaaggctacgttcttaaacccgtctatccgcgcttctttaatgtgggtacgcgcgtggcgattaaatgcaagaactccaaattttcggagaaagcctttctgattgaaccaattaaagcgaaggttgaactgacggagaacgataaacgtctgctcggaatctttagcgaatatgttacctggaaccgcgtcagtaacgtactgtcacatattggctcagtgaccgccaaagattttgtccgtgtttcgggtctgacgatgaaagacatcattcgcgaagcagcacgcgaaggccatgatctgttgttcgctgataacccgtcggcggtgctgaaggagctgacaggcctcatccagaacacgattcgctccaaatggcacgaagttctggag

SEQ ID NO: 2924 - protein, 346 aa, synthetic construct
  REGION 1..346: note = variant of RNA ligase 2 from Klebsiella phage KP179
MHHHHHHGGSNMFAYYSSLENHTNTKFISKIRGAGFLSHTVEWVAREKIHGTNFSVIITPTEIVPAKRTGPILEDESFFGHEIIMKKYMDSFKKVQNMLNAMDLVSVQIFGEFAGGGIQKGFDYGDKDFYVFDILSDSGNEKSYWDDYRVESFCTTVGLKLAPLLGRGSFAELSQYPNDFKSLVNRYNELVDTVGLEMANKHVFGPQASSEEGLAEGYVLKPVYPRFFNVGTRVAIKCKNSKFSEKAFLIEPIKAKVELTENDKRLLGIFSEYVTWNRVSNVLSHIGSVTAKDFVRVSGLTMKDIIREAAREGHDLLFADNPSAVLKELTGLIQNTIRSKWHEVLE

SEQ ID NO: 2925 - DNA, 1038 bp, synthetic construct
  misc_feature 1..1038: note = variant of RNA ligase 2 from Klebsiella phage KP179
  source 1..1038: mol_type = other DNA
atgcatcaccatcaccatcacggtggcagcaacatgtttgcgtattattcaagtctggaaaaccataccaatgccaagttcattagcaagatccgtggtgcaggcttcctgagccacaccgtggaatgggtagctcgcgagaagattcatggaacgaactttagcgttatcattactccgaccgaaatcgtgccggccaaacgcacagggccgatcttggaagacgagagcttctttggtcatgaaattatcatgaaaaaatatatggactccttcaaaaaggtgcagaacatgctgaatgcgatggtgcttgttagcgtgcaaatctttggcgaatttgcgggtggtggcattcagaaaggctttgattacggagacaaagatttctatgtgtttgacatcctgtctgatagcgggaacgagaaaagctactgggatgactatcgcgtcgaatcgttttgcaccactgttggtctgaaattagcgcctctgctgggacgtggtagtttcgctgaactgtcccagtacccaaacgatttcaaaagcctggtgaaccgttataatgaattggttgatacggtcggcctggagatggccaataaacacgtctttggtccgcaagcgtcttctgaagaaggcctggcagaaggctacgttcttaaacccgtctatccgcgcttctttaatgtgggtacgcgcgtggcgattaaatgcaagaactccaaattttcggagaaagcctttctgattgaaccaattaaagcgaaggttgaactgacggagaacgataaacgtctgctcggaatctttagcgaatatgttacctggaaccgcgtcagtaacgtactgtcacatattggctcagtgaccgccaaagattttgtccgtgtttcgggtctgacgatgaaagacatcattcgcgaagcagcacgcgaaggccatgatctgttgttcgctgataacccgtcggcggtgctgaaggagctgacaggcctcatccagaacacgattcgctccaaatggcacgaagttctggag

SEQ ID NO: 2926 - protein, 346 aa, synthetic construct
  REGION 1..346: note = variant of RNA ligase 2 from Klebsiella phage KP179
MHHHHHHGGSNMFAYYSSLENHTNAKFISKIRGAGFLSHTVEWVAREKIHGTNFSVIITPTEIVPAKRTGPILEDESFFGHEIIMKKYMDSFKKVQNMLNAMVLVSVQIFGEFAGGGIQKGFDYGDKDFYVFDILSDSGNEKSYWDDYRVESFCTTVGLKLAPLLGRGSFAELSQYPNDFKSLVNRYNELVDTVGLEMANKHVFGPQASSEEGLAEGYVLKPVYPRFFNVGTRVAIKCKNSKFSEKAFLIEPIKAKVELTENDKRLLGIFSEYVTWNRVSNVLSHIGSVTAKDFVRVSGLTMKDIIREAAREGHDLLFADNPSAVLKELTGLIQNTIRSKWHEVLE

SEQ ID NO: 2927 - DNA, 1038 bp, synthetic construct
  misc_feature 1..1038: note = variant of RNA ligase 2 from Klebsiella phage KP179
  source 1..1038: mol_type = other DNA
atgcatcaccatcaccatcacggtggcagcaacatgtttgcgtattattcaagtctggaaaaccataccaatgccaagttcattagcaagatccgtggtgcaggcttcctgagccacaccgtggaatgggtagctcgcgagaagattcatggaacgaactttagcgttatcattactccgaccgaaatcgtgccggccaaacgcacagggccgatcttggaagacgagagcttctttggtcatgaaattatcatgaaaaaatatatggactccttcaaaaaggtgcagaacatgctgaatgcgatggatcttgttagcgtgcaaatctttggcgaatttgcgggtggtggcattcagaaaggctttgattacggagacaaagatttctatgtgtttgacatcctgtctgatagcgggaacgagaaaagctactgggatgactatcgcgtcgaatcgttttgcaccactgttggtctgaaattagcgcctctgctgggacgtggtagtttcgctgaactgtcccagtacccaaacgatttcaaaagcctggtgaaccgttataatgaattggttgatacggtcggcctggagatggccaataaacacgtctttggtccgcaagcgtcttctgaagaaggcctggcagaaggctacgttcttaaacccgtctatccgcgcttctttaatgtgggtacgcgcgtggcgattaaatgcaagaactccaaattttcggagaaagcctttctgattgaaccaattaaagcgaaggttgaactgacggagaacgataaacgtctgctcggaatctttagcgaatatgttacctggaaccgcgtcagtaacgtactgtcacatattggctcagtgaccgccaaagattttgtccgtgtttcgggtctgacgatgaaagacatcattcgcgaagcagcacgcgaaggccatgatctgttgttcgctgataacccgtcggcggtgctgaaggagctgacaggcctcatccagaacacgattcgctccaaatggcacgaagttctgtct

SEQ ID NO: 2928 - protein, 346 aa, synthetic construct
  REGION 1..346: note = variant of RNA ligase 2 from Klebsiella phage KP179
MHHHHHHGGSNMFAYYSSLENHTNAKFISKIRGAGFLSHTVEWVAREKIHGTNFSVIITPTEIVPAKRTGPILEDESFFGHEIIMKKYMDSFKKVQNMLNAMDLVSVQIFGEFAGGGIQKGFDYGDKDFYVFDILSDSGNEKSYWDDYRVESFCTTVGLKLAPLLGRGSFAELSQYPNDFKSLVNRYNELVDTVGLEMANKHVFGPQASSEEGLAEGYVLKPVYPRFFNVGTRVAIKCKNSKFSEKAFLIEPIKAKVELTENDKRLLGIFSEYVTWNRVSNVLSHIGSVTAKDFVRVSGLTMKDIIREAAREGHDLLFADNPSAVLKELTGLIQNTIRSKWHEVLS

SEQ ID NO: 2929 - DNA, 1038 bp, synthetic construct
  misc_feature 1..1038: note = variant of RNA ligase 2 from Klebsiella phage KP179
  source 1..1038: mol_type = other DNA
atgcatcaccatcaccatcacggtggcagcaacatgtttgcgtattattcaagtctggaaaaccataccaatgccaagttcattagcaagatccgtggtgcaggcttcctgagccacaccgtgacgtgggtagctcgcgagaagattcatggaacgaactttagcgttatcattactccgaccgaaatcgtgccggccaaacgcacagggccgatcttggaagacgagagcttctttggtcatgaaattatcatgaaaaaatatatggactccttcaaaaaggtgcagaacatgctgaatgcgatggatcttgttagcgtgcaaatctttggcgaatttgcgggtggtggcattcagaaaggctttgattacggagacaaagatttctatgtgtttgacatcctgtctgatagcgggaacgagaaaagctactgggatgactatcgcgtcgaatcgttttgcaccactgttggtctgaaattagcgcctctgctgggacgtggtagtttcgctgaactgtcccagtacccaaacgatttcaaaagcctggtgaaccgttataatgaattggttgatacggtcggcctggagatggccaataaacacgtctttggtccgcaagcgtcttctgaagaaggcctggcagaaggctacgttcttaaacccgtctatccgcgcttctttaatgtgggtacgcgcgtggcgattaaatgcaagaactccaaattttcggagaaagcctttctgattgaaccaattaaagcgaaggttgaactgacggagaacgataaacgtctgctcggaatctttagcgaatatgttacctggaaccgcgtcagtaacgtactgtcacatattggctcagtgaccgccaaagattttgtccgtgtttcgggtctgacgatgaaagacatcattcgcgaagcagcacgcgaaggccatgatctgttgttcgctgataacccgtcggcggtgctgaaggagctgacaggcctcatccagaacacgattcgctccaaatggcacgaagttctggag

SEQ ID NO: 2930 - protein, 346 aa, synthetic construct
  REGION 1..346: note = variant of RNA ligase 2 from Klebsiella phage KP179
MHHHHHHGGSNMFAYYSSLENHTNAKFISKIRGAGFLSHTVTWVAREKIHGTNFSVIITPTEIVPAKRTGPILEDESFFGHEIIMKKYMDSFKKVQNMLNAMDLVSVQIFGEFAGGGIQKGFDYGDKDFYVFDILSDSGNEKSYWDDYRVESFCTTVGLKLAPLLGRGSFAELSQYPNDFKSLVNRYNELVDTVGLEMANKHVFGPQASSEEGLAEGYVLKPVYPRFFNVGTRVAIKCKNSKFSEKAFLIEPIKAKVELTENDKRLLGIFSEYVTWNRVSNVLSHIGSVTAKDFVRVSGLTMKDIIREAAREGHDLLFADNPSAVLKELTGLIQNTIRSKWHEVLE

SEQ ID NO: 2931 - DNA, 1038 bp, synthetic construct
  misc_feature 1..1038: note = variant of RNA ligase 2 from Klebsiella phage KP179
  source 1..1038: mol_type = other DNA
atgcatcaccatcaccatcacggtggcagcaacatgtttgcgtattattcaagtctggaaaaccataccaatgccaagttcattagcaagatccgtggtgcaggcttcctgagccacaccgtggaatgggtagctcgcgagaagattcatggaacgaactttagcgttatcattactccgaccgaaatcgtgccggccaaacgcacagggccgatcttggatgacgagagcttctttggtcatgaaattatcatgaaaaaatatatggactccttcaaaaaggtgcagaacatgctgaatgcgatggatcttgttagcgtgcaaatctttggcgaatttgcgggtggtggcattcagaaaggctttgattacggagacaaagatttctatgtgtttgacatcctgtctgatagcgggaacgagaaaagctactgggatgactatcgcgtcgaatcgttttgcaccactgttggtctgaaattagcgcctctgctgggacgtggtagtttcgctgaactgtcccagtacccaaacgatttcaaaagcctggtgaaccgttataatgaattggttgatacggtcggcctggagatggccaataaacacgtctttggtccgcaagcgtcttctgaagaaggcctggcagaaggctacgttcttaaacccgtctatccgcgcttctttaatgtgggtacgcgcgtggcgattaaatgcaagaactccaaattttcggagaaagcctttctgattgaaccaattaaagcgaaggttgaactgacggagaacgataaacgtctgctcggaatctttagcgaatatgttacctggaaccgcgtcagtaacgtactgtcacatattggctcagtgaccgccaaagattttgtccgtgtttcgggtctgacgatgaaagacatcattcgcgaagcagcacgcgaaggccatgatctgttgttcgctgataacccgtcggcggtgctgaaggagctgacaggcctcatccagaacacgattcgctccaaatggcacgaagttctggag

SEQ ID NO: 2932 - protein, 346 aa, synthetic construct
  REGION 1..346: note = variant of RNA ligase 2 from Klebsiella phage KP179
MHHHHHHGGSNMFAYYSSLENHTNAKFISKIRGAGFLSHTVEWVAREKIHGTNFSVIITPTEIVPAKRTGPILDDESFFGHEIIMKKYMDSFKKVQNMLNAMDLVSVQIFGEFAGGGIQKGFDYGDKDFYVFDILSDSGNEKSYWDDYRVESFCTTVGLKLAPLLGRGSFAELSQYPNDFKSLVNRYNELVDTVGLEMANKHVFGPQASSEEGLAEGYVLKPVYPRFFNVGTRVAIKCKNSKFSEKAFLIEPIKAKVELTENDKRLLGIFSEYVTWNRVSNVLSHIGSVTAKDFVRVSGLTMKDIIREAAREGHDLLFADNPSAVLKELTGLIQNTIRSKWHEVLE

SEQ ID NO: 2933 - DNA, 1038 bp, synthetic construct
  misc_feature 1..1038: note = variant of RNA ligase 2 from Klebsiella phage KP179
  source 1..1038: mol_type = other DNA
atgcatcaccatcaccatcacggtggcagcaacatgtttgcgtattattcaagtctggaaaaccataccaatgccaagttcattagcaagatccgtggtgcaggcttcctgagccacaccgtggaatgggtagctcgcgagaagattcatggaacgaactttagcgttatcattactccgaccgaaatcgtgccggccaaacgcacagggccgatcttggaagacgagagcttctttggtcatgaaattatcatgaaaaaatatatggactccttcaaaaaggtgcagaacatgctgaatgcgatggatcttgttagcgtgcaaatctttggcgaaatggcgggtggtggcattcagaaaggctttgattacggagacaaagatttctatgtgtttgacatcctgtctgatagcgggaacgagaaaagctactgggatgactatcgcgtcgaatcgttttgcaccactgttggtctgaaattagcgcctctgctgggacgtggtagtttcgctgaactgtcccagtacccaaacgatttcaaaagcctggtgaaccgttataatgaattggttgatacggtcggcctggagatggccaataaacacgtctttggtccgcaagcgtcttctgaagaaggcctggcagaaggctacgttcttaaacccgtctatccgcgcttctttaatgtgggtacgcgcgtggcgattaaatgcaagaactccaaattttcggagaaagcctttctgattgaaccaattaaagcgaaggttgaactgacggagaacgataaacgtctgctcggaatctttagcgaatatgttacctggaaccgcgtcagtaacgtactgtcacatattggctcagtgaccgccaaagattttgtccgtgtttcgggtctgacgatgaaagacatcattcgcgaagcagcacgcgaaggccatgatctgttgttcgctgataacccgtcggcggtgctgaaggagctgacaggcctcatccagaacacgattcgctccaaatggcacgaagttctggag

SEQ ID NO: 2934 - protein, 346 aa, synthetic construct
  REGION 1..346: note = variant of RNA ligase 2 from Klebsiella phage KP179
MHHHHHHGGSNMFAYYSSLENHTNAKFISKIRGAGFLSHTVEWVAREKIHGTNFSVIITPTEIVPAKRTGPILEDESFFGHEIIMKKYMDSFKKVQNMLNAMDLVSVQIFGEMAGGGIQKGFDYGDKDFYVFDILSDSGNEKSYWDDYRVESFCTTVGLKLAPLLGRGSFAELSQYPNDFKSLVNRYNELVDTVGLEMANKHVFGPQASSEEGLAEGYVLKPVYPRFFNVGTRVAIKCKNSKFSEKAFLIEPIKAKVELTENDKRLLGIFSEYVTWNRVSNVLSHIGSVTAKDFVRVSGLTMKDIIREAAREGHDLLFADNPSAVLKELTGLIQNTIRSKWHEVLE

SEQ ID NO: 2935 - DNA, 1038 bp, synthetic construct
  misc_feature 1..1038: note = variant of RNA ligase 2 from Klebsiella phage KP179
  source 1..1038: mol_type = other DNA
atgcatcaccatcaccatcacggtggcagcaacatgtgggcgtattattcaagtctggaaaaccataccaatgccaagttcattagcaagatccgtggtgcaggcttcctgagccacaccgtggaatgggtagctcgcgagaagattcatggaacgaactttagcgttatcattactccgaccgaaatcgtgccggccaaacgcacagggccgatcttggaagacgagagcttctttggtcatgaaattatcatgaaaaaatatatggactccttcaaaaaggtgcagaacatgctgaatgcgatggatcttgttagcgtgcaaatctttggcgaatttgcgggtggtggcattcagaaaggctttgattacggagacaaagatttctatgtgtttgacatcctgtctgatagcgggaacgagaaaagctactgggatgactatcgcgtcgaatcgttttgcaccactgttggtctgaaattagcgcctctgctgggacgtggtagtttcgctgaactgtcccagtacccaaacgatttcaaaagcctggtgaaccgttataatgaattggttgatacggtcggcctggagatggccaataaacacgtctttggtccgcaagcgtcttctgaagaaggcctggcagaaggctacgttcttaaacccgtctatccgcgcttctttaatgtgggtacgcgcgtggcgattaaatgcaagaactccaaattttcggagaaagcctttctgattgaaccaattaaagcgaaggttgaactgacggagaacgataaacgtctgctcggaatctttagcgaatatgttacctggaaccgcgtcagtaacgtactgtcacatattggctcagtgaccgccaaagattttgtccgtgtttcgggtctgacgatgaaagacatcattcgcgaagcagcacgcgaaggccatgatctgttgttcgctgataacccgtcggcggtgctgaaggagctgacaggcctcatccagaacacgattcgctccaaatggcacgaagttctggag

SEQ ID NO: 2936 - protein, 346 aa, synthetic construct
  REGION 1..346: note = variant of RNA ligase 2 from Klebsiella phage KP179
MHHHHHHGGSNMWAYYSSLENHTNAKFISKIRGAGFLSHTVEWVAREKIHGTNFSVIITPTEIVPAKRTGPILEDESFFGHEIIMKKYMDSFKKVQNMLNAMDLVSVQIFGEFAGGGIQKGFDYGDKDFYVFDILSDSGNEKSYWDDYRVESFCTTVGLKLAPLLGRGSFAELSQYPNDFKSLVNRYNELVDTVGLEMANKHVFGPQASSEEGLAEGYVLKPVYPRFFNVGTRVAIKCKNSKFSEKAFLIEPIKAKVELTENDKRLLGIFSEYVTWNRVSNVLSHIGSVTAKDFVRVSGLTMKDIIREAAREGHDLLFADNPSAVLKELTGLIQNTIRSKWHEVLE

SEQ ID NO: 2937 - DNA, 1038 bp, synthetic construct
  misc_feature 1..1038: note = variant of RNA ligase 2 from Klebsiella phage KP179
  source 1..1038: mol_type = other DNA
atgcatcaccatcaccatcacggtggcagcaacatgtttgcgtattattcaagtctggaaaaccataccaatgccaagttcattagcaagatccgtggtgcaggcttcctgagccacaccgtggaatgggtagctcgcgagaagattcatggaacgaactttagcgttatcattactccgaccgaaatcgtgccggccaaacgcacagggccgatcttggaagacgagagcttctttggtcatgaaattatcatgaaaaaatatatggactccttcaaaaaggtgcagaacatgctgaatgcgatggatcttgttagcgtgcaaatctttggcgaatttgcgggtggtggcattcagaaaggctttgattacggagacaaagatttctatgtgtttgacatcctgtctgatagcgggaacgagaaaagctactgggatgactatcgcgtcgaatcgttttgcaccactgttggtctgaaattagcgcctctgctgggacgtggtagtttcgctgaactgtcccagtacccaaacgatttcaaaagcctggtgaaccgttataatgaattggttgatacggtcggcctggagatggccaataaacacgtctttggtccgcaagcgtcttctgaagaaggcctggcagaaggctacgttcttaaacccgtctatccgcgcttcgataatgtgggtacgcgcgtggcgattaaatgcaagaactccaaattttcggagaaagcctttctgattgaaccaattaaagcgaaggttgaactgacggagaacgataaacgtctgctcggaatctttagcgaatatgttacctggaaccgcgtcagtaacgtactgtcacatattggctcagtgaccgccaaagattttgtccgtgtttcgggtctgacgatgaaagacatcattcgcgaagcagcacgcgaaggccatgatctgttgttcgctgataacccgtcggcggtgctgaaggagctgacaggcctcatccagaacacgattcgctccaaatggcacgaagttctggag

SEQ ID NO: 2938 - protein, 346 aa, synthetic construct
  REGION 1..346: note = variant of RNA ligase 2 from Klebsiella phage KP179
MHHHHHHGGSNMFAYYSSLENHTNAKFISKIRGAGFLSHTVEWVAREKIHGTNFSVIITPTEIVPAKRTGPILEDESFFGHEIIMKKYMDSFKKVQNMLNAMDLVSVQIFGEFAGGGIQKGFDYGDKDFYVFDILSDSGNEKSYWDDYRVESFCTTVGLKLAPLLGRGSFAELSQYPNDFKSLVNRYNELVDTVGLEMANKHVFGPQASSEEGLAEGYVLKPVYPRFDNVGTRVAIKCKNSKFSEKAFLIEPIKAKVELTENDKRLLGIFSEYVTWNRVSNVLSHIGSVTAKDFVRVSGLTMKDIIREAAREGHDLLFADNPSAVLKELTGLIQNTIRSKWHEVLE

SEQ ID NO: 2939 - DNA, 1038 bp, synthetic construct
  misc_feature 1..1038: note = variant of RNA ligase 2 from Klebsiella phage KP179
  source 1..1038: mol_type = other DNA
atgcatcaccatcaccatcacggtggcagcaacatgtttgcgtattattcaagtctggaaaaccataccaatgccaagttcattagcaagatccgtggtgcaggcttcctgagccacaccgtggaatgggtagctcgcgagaagattcatggaacgaactttagcgttatcattactccgaccgaaatcgtgccggccaaacgcacagggccgatcttggaagacgagagcttctttggtcatgaaattatcatgaaaaaatatatggactccttcaaaaaggtgcagaacatgctgaatgcgatggatcttgttagcgtgcaaatctttggcgaatttgcgggtggtggcattcagaaaggctttgattacggagacaaagatttctatgtgtttgacatcctgtctgatagcgggaacgagaaaagctactgggatgactatcgcgtcgaatcgttttgcaccactgttggtctgaaattagcgcctctgctgggacgtggtagtttcgctgaactgtcccagtacccaaacgatttcaaaagcctggtgaaccgttataatgaattggttgatacggtcggcctggagatggccaataaacacgtctttggtccgcaagcgtcttctgaagaaggcctggcagaaggctacgttcttaaacccgtctatccgcgcttcctgaatgtgggtacgcgcgtggcgattaaatgcaagaactccaaattttcggagaaagcctttctgattgaaccaattaaagcgaaggttgaactgacggagaacgataaacgtctgctcggaatctttagcgaatatgttacctggaaccgcgtcagtaacgtactgtcacatattggctcagtgaccgccaaagattttgtccgtgtttcgggtctgacgatgaaagacatcattcgcgaagcagcacgcgaaggccatgatctgttgttcgctgataacccgtcggcggtgctgaaggagctgacaggcctcatccagaacacgattcgctccaaatggcacgaagttctggag

SEQ ID NO: 2940 - protein, 346 aa, synthetic construct
  REGION 1..346: note = variant of RNA ligase 2 from Klebsiella phage KP179
MHHHHHHGGSNMFAYYSSLENHTNAKFISKIRGAGFLSHTVEWVAREKIHGTNFSVIITPTEIVPAKRTGPILEDESFFGHEIIMKKYMDSFKKVQNMLNAMDLVSVQIFGEFAGGGIQKGFDYGDKDFYVFDILSDSGNEKSYWDDYRVESFCTTVGLKLAPLLGRGSFAELSQYPNDFKSLVNRYNELVDTVGLEMANKHVFGPQASSEEGLAEGYVLKPVYPRFLNVGTRVAIKCKNSKFSEKAFLIEPIKAKVELTENDKRLLGIFSEYVTWNRVSNVLSHIGSVTAKDFVRVSGLTMKDIIREAAREGHDLLFADNPSAVLKELTGLIQNTIRSKWHEVLE

SEQ ID NO: 2941 - DNA, 1038 bp, synthetic construct
  misc_feature 1..1038: note = variant of RNA ligase 2 from Klebsiella phage KP179
  source 1..1038: mol_type = other DNA
atgcatcaccatcaccatcacggtggcagcaacatgtttgcgtattattcaagtctggaaaaccataccaatgccaagttcattagcaagatccgtggtgcaggcttcctgagccacaccgtggaatgggtagctcgcgagaagattcatggaacgaactttagcgttatcattactccgaccgaaatcgtgccggccaaacgcacagggccgatcttggaagacgagagcttctttggtcatgaaattatcatgaaaaaatatatggactccttcaaaaaggtgcagaacatgctgaatgcgatggatcttgttagcgtgcaaatctttggcgaatttgcgggtggtggcattcagaaaggctttgattacggagacaaagatttctatgtgtttgacatcctgtctgatagcgggaacgagaaaagctactgggatgactatcgcgtcgaatcgttttgcaccactgttggtctgaaattagcgcctctgctgggacgtggtagtttcgctgaactgtcccagtacccaaacgatttcaaaagcctggtgaaccgttataatgaattggttgatacggtcggcctggagatggccaataaacacgtctttggtccgcaagcgtcttctgaagaaggcctggcagaaggctacgttcttaaacccgtctatccgcgcttctttaatgtgggtacgcgcgtggcgattaaatgcaagaactccaaattttcggagaaagcctttctgattgaaccaattaaagcgaaggttgaactgacggagaacgataaacgtctgctcggaatctttagcgaatatgttacctggaaccgcgtcagtaacgtactgtcacatattggctcagtgaccgccaaagattttgtccgtgtttcgggtctgacgatgaaagacatcattcgcgaagcagcacgcgaaggccatgatctgttggcggctgataacccgtcggcggtgctgaaggagctgacaggcctcatccagaacacgattcgctccaaatggcacgaagttctggag

SEQ ID NO: 2942 - protein, 346 aa, synthetic construct
  REGION 1..346: note = variant of RNA ligase 2 from Klebsiella phage KP179
MHHHHHHGGSNMFAYYSSLENHTNAKFISKIRGAGFLSHTVEWVAREKIHGTNFSVIITPTEIVPAKRTGPILEDESFFGHEIIMKKYMDSFKKVQNMLNAMDLVSVQIFGEFAGGGIQKGFDYGDKDFYVFDILSDSGNEKSYWDDYRVESFCTTVGLKLAPLLGRGSFAELSQYPNDFKSLVNRYNELVDTVGLEMANKHVFGPQASSEEGLAEGYVLKPVYPRFFNVGTRVAIKCKNSKFSEKAFLIEPIKAKVELTENDKRLLGIFSEYVTWNRVSNVLSHIGSVTAKDFVRVSGLTMKDIIREAAREGHDLLAADNPSAVLKELTGLIQNTIRSKWHEVLE

SEQ ID NO: 2943 - DNA, 1038 bp, synthetic construct
  misc_feature 1..1038: note = variant of RNA ligase 2 from Klebsiella phage KP179
  source 1..1038: mol_type = other DNA
atgcatcaccatcaccatcacggtggcagcaacatgtttgcgtattattcaagtctggaaaaccataccaatgccaagttcattagcaagatccgtggtgcaggcttcctgagccacaccgtggaatgggtagctcgcgagaagattcatggaacgaactttagcgttatcattactccgaccgaaatcgtgccggccaaacgcacagggccgatcttggaagacgagagcttctttggtcatgaaattatcatgaaaaaatatatggactccttcaaaaaggtgcagaacatgctgaatgcgatggatcttgttagcgtgcaaatctttggcgaatttgcgggtggtggcattcagaaaggctttgattacggagacaaagatttctatgtgtttgacatcctgtctgatagcgggaacgagaaaagctactgggatgactatcgcgtcgaatcgttttgcaccactgttggtctgaaattagcgcctctgctgggacgtggtagtttcgctgaactgtcccagtacccaaacgatttcaaaagcctggtgaaccgttataatgaattggttgatacggtcggcctggagatggccaataaacacgtctttggtccgcaagcgtcttctgaagaaggcctggcagaaggctacgttcttaaacccgtctatccgcgcttctttaatgtgggtacgcgcgtggcgattaaatgcaagaactccaaattttcggagaaagcctttctgattgaaccaattaaagcgaaggttgaactgacggagaacgataaacgtctgctcggaatctttagcgaatatgttacctggaaccgcgtcagtaacgtactgtcacatattggctcagtgaccgccaaagattttgtccgtgtttcgggtctgacgatgaaagacatcattcgcgaagcagcacgcgaaggccatgatctgttgggggctgataacccgtcggcggtgctgaaggagctgacaggcctcatccagaacacgattcgctccaaatggcacgaagttctggag

SEQ ID NO: 2944 - protein, 346 aa, synthetic construct
  REGION 1..346: note = variant of RNA ligase 2 from Klebsiella phage KP179
MHHHHHHGGSNMFAYYSSLENHTNAKFISKIRGAGFLSHTVEWVAREKIHGTNFSVIITPTEIVPAKRTGPILEDESFFGHEIIMKKYMDSFKKVQNMLNAMDLVSVQIFGEFAGGGIQKGFDYGDKDFYVFDILSDSGNEKSYWDDYRVESFCTTVGLKLAPLLGRGSFAELSQYPNDFKSLVNRYNELVDTVGLEMANKHVFGPQASSEEGLAEGYVLKPVYPRFFNVGTRVAIKCKNSKFSEKAFLIEPIKAKVELTENDKRLLGIFSEYVTWNRVSNVLSHIGSVTAKDFVRVSGLTMKDIIREAAREGHDLLGADNPSAVLKELTGLIQNTIRSKWHEVLE

SEQ ID NO: 2945 - DNA, 1038 bp, synthetic construct
  misc_feature 1..1038: note = variant of RNA ligase 2 from Klebsiella phage KP179
  source 1..1038: mol_type = other DNA
atgcatcaccatcaccatcacggtggcagcaacatgtttgcgtattattcaagtctggaaaaccataccaatgccaagttcattagcaagatccgtggtgcaggcttcctgagccacaccgtggaatgggtagctcgcgagaagattcatggaacgaactttagcgttatcattactccgaccgaaatcgtgccggccaaacgcacagggccgatcttggaagacgagagcttctttggtcatgaaattatcatgaaaaaatatatggactccttcaaaaaggtgcagaacatgctgaatgcgatggatcttgttagcgtgcaaatctttggcgaatttgcgggtggtggcattcagaaaaattttgattacggagacaaagatttctatgtgtttgacatcctgtctgatagcgggaacgagaaaagctactgggatgactatcgcgtcgaatcgttttgcaccactgttggtctgaaattagcgcctctgctgggacgtggtagtttcgctgaactgtcccagtacccaaacgatttcaaaagcctggtgaaccgttataatgaattggttgatacggtcggcctggagatggccaataaacacgtctttggtccgcaagcgtcttctgaagaaggcctggcagaaggctacgttcttaaacccgtctatccgcgcttctttaatgtgggtacgcgcgtggcgattaaatgcaagaactccaaattttcggagaaagcctttctgattgaaccaattaaagcgaaggttgaactgacggagaacgataaacgtctgctcggaatctttagcgaatatgttacctggaaccgcgtcagtaacgtactgtcacatattggctcagtgaccgccaaagattttgtccgtgtttcgggtctgacgatgaaagacatcattcgcgaagcagcacgcgaaggccatgatctgttgttcgctgataacccgtcggcggtgctgaaggagctgacaggcctcatccagaacacgattcgctccaaatggcacgaagttctggag

SEQ ID NO: 2946 - protein, 346 aa, synthetic construct
  REGION 1..346: note = variant of RNA ligase 2 from Klebsiella phage KP179
MHHHHHHGGSNMFAYYSSLENHTNAKFISKIRGAGFLSHTVEWVAREKIHGTNFSVIITPTEIVPAKRTGPILEDESFFGHEIIMKKYMDSFKKVQNMLNAMDLVSVQIFGEFAGGGIQKNFDYGDKDFYVFDILSDSGNEKSYWDDYRVESFCTTVGLKLAPLLGRGSFAELSQYPNDFKSLVNRYNELVDTVGLEMANKHVFGPQASSEEGLAEGYVLKPVYPRFFNVGTRVAIKCKNSKFSEKAFLIEPIKAKVELTENDKRLLGIFSEYVTWNRVSNVLSHIGSVTAKDFVRVSGLTMKDIIREAAREGHDLLFADNPSAVLKELTGLIQNTIRSKWHEVLE

SEQ ID NO: 2947 - DNA, 1038 bp, synthetic construct
  misc_feature 1..1038: note = variant of RNA ligase 2 from Klebsiella phage KP179
  source 1..1038: mol_type = other DNA
atgcatcaccatcaccatcacggtggcagcaacatgtttgcgtattattcaagtctggaaaaccataccaatgccaagttcattagcaagatccgtggtgcaggcttcctgagccacaccgtggaatgggtagctcgcgagaagattcatggaacgaactttagcgttatcattactccgaccgaaatcgtgccggccaaacgcacagggccgatcttggaagacgagagcttctttggtcatgaaattatcatgaaaaaatatatggactccttcaaaaaggtgcagaacatgctgaatgcgatggatcttgttagcgtgcaaatctttggcgaatttgcgggtggtggcattcagaaaggctttgattacggagacaaagatttctatgtgtttgacatcctgtctgatagcgggaacgagaaaagctactgggatgactatcgcgtcgaatcgttttgcaccactgttggtctgaaattagcgcctctgctgggacgtggtagtttcgctgaactgtcccagtacccaaacgatttcaaaagcctggtgaaccgttataatgaattggttgatacggtcggcctggagatggccaataaacacgtctttggtccgcaagcgtcttctgaagaaggcctggcagaaggctacgttcttaaacccgtctatccgcgcttctttaatgtgggtacgcgcgtggcgattaaatgcaagaactccaaattttcggagaaagcctttctgattgaaccaattaaagcgaaggttgaactgacggagaacgataaacgtctgctcggaatctttagcgaatatgttacctggaaccgcgtcagtaacgtactgtcacatattggctcagtgaccgccaaagattttgtccgtgtttcggagctgacgatgaaagacatcattcgcgaagcagcacgcgaaggccatgatctgttgttcgctgataacccgtcggcggtgctgaaggagctgacaggcctcatccagaacacgattcgctccaaatggcacgaagttctggag

SEQ ID NO: 2948 - protein, 346 aa, synthetic construct
  REGION 1..346: note = variant of RNA ligase 2 from Klebsiella phage KP179
MHHHHHHGGSNMFAYYSSLENHTNAKFISKIRGAGFLSHTVEWVAREKIHGTNFSVIITPTEIVPAKRTGPILEDESFFGHEIIMKKYMDSFKKVQNMLNAMDLVSVQIFGEFAGGGIQKGFDYGDKDFYVFDILSDSGNEKSYWDDYRVESFCTTVGLKLAPLLGRGSFAELSQYPNDFKSLVNRYNELVDTVGLEMANKHVFGPQASSEEGLAEGYVLKPVYPRFFNVGTRVAIKCKNSKFSEKAFLIEPIKAKVELTENDKRLLGIFSEYVTWNRVSNVLSHIGSVTAKDFVRVSELTMKDIIREAAREGHDLLFADNPSAVLKELTGLIQNTIRSKWHEVLE

SEQ ID NO: 2949 - DNA, 1038 bp, synthetic construct
  misc_feature 1..1038: note = variant of RNA ligase 2 from Klebsiella phage KP179
  source 1..1038: mol_type = other DNA
atgcatcaccatcaccatcacggtggcagcaacatgtttgcgtattattcaagtctggaaaaccataccaatgccaagttcattagcaagatccgtggtgcaggcttcctgagccacaccgtggaatgggtagctcgcgagaagattcatggaacgaactttagcgttatcattactccgaccgaaatcgtgccggccaaacgcacagggccgatcttggaagacgagagcttctttggtcatgaaattatcatgaaaaaatatatggactccttcaaaaaggtgcagaacatgctgaatgcgatggatcttgttagcgtgcaaatctttggcgaatttgcgggtggtggcattcagaaaggctttgattacggagacaaagatttctatgtgtttgacatcctgtctgatagcgggaacgagaaaagctactgggatgactatcgcgtcgaatcgttttgcaccactgttggtctgaaattagcgcctctgctgggacgtggtagtttcgctgaactgtcccagtacccaaacgatttcaaaagcctggtgaaccgttataatgaattggttgatacggtcggcctggagatggccaataaacacgtctttggtccgcaagcgtcttctgaagaaggcctggcagaaggctacgttcttaaacccgtctatccgcgcttctttaatgtgggtacgcgcgtggcgattaaatgcaagaactccaaattttcggagaaagcctttctgattgaaccaattaaagcgaaggttgaactgacggagaacgataaacgtctgctcggaatctttagcgaatatgttacctggaaccgcgtcagtaacgtactgtcacatattggctcagtgaccgccaaagattttgtccgtgtttcgaggctgacgatgaaagacatcattcgcgaagcagcacgcgaaggccatgatctgttgttcgctgataacccgtcggcggtgctgaaggagctgacaggcctcatccagaacacgattcgctccaaatggcacgaagttctggag

SEQ ID NO: 2950 - protein, 346 aa, synthetic construct
  REGION 1..346: note = variant of RNA ligase 2 from Klebsiella phage KP179
MHHHHHHGGSNMFAYYSSLENHTNAKFISKIRGAGFLSHTVEWVAREKIHGTNFSVIITPTEIVPAKRTGPILEDESFFGHEIIMKKYMDSFKKVQNMLNAMDLVSVQIFGEFAGGGIQKGFDYGDKDFYVFDILSDSGNEKSYWDDYRVESFCTTVGLKLAPLLGRGSFAELSQYPNDFKSLVNRYNELVDTVGLEMANKHVFGPQASSEEGLAEGYVLKPVYPRFFNVGTRVAIKCKNSKFSEKAFLIEPIKAKVELTENDKRLLGIFSEYVTWNRVSNVLSHIGSVTAKDFVRVSRLTMKDIIREAAREGHDLLFADNPSAVLKELTGLIQNTIRSKWHEVLE

SEQ ID NO: 2951 - DNA, 1038 bp, synthetic construct
  misc_feature 1..1038: note = variant of RNA ligase 2 from Klebsiella phage KP179
  source 1..1038: mol_type = other DNA
atgcatcaccatcaccatcacggtggcagcaacatgtttgcgtattattcaagtctggaaaaccataccaatgccaagttcattagcaagatccgtttggcaggcttcctgagccacaccgtggaatgggtagctcgcgagaagattcatggaacgaactttagcgttatcattactccgaccgaaatcgtgccggccaaacgcacagggccgatcttggaagacgagagcttctttggtcatgaaattatcatgaaaaaatatatggactccttcaaaaaggtgcagaacatgctgaatgcgatggatcttgttagcgtgcaaatctttggcgaatttgcgggtggtggcattcagaaaggctttgattacggagacaaagatttctatgtgtttgacatcctgtctgatagcgggaacgagaaaagctactgggatgactatcgcgtcgaatcgttttgcaccactgttggtctgaaattagcgcctctgctgggacgtggtagtttcgctgaactgtcccagtacccaaacgatttcaaaagcctggtgaaccgttataatgaattggttgatacggtcggcctggagatggccaataaacacgtctttggtccgcaagcgtcttctgaagaaggcctggcagaaggctacgttcttaaacccgtctatccgcgcttctttaatgtgggtacgcgcgtggcgattaaatgcaagaactccaaattttcggagaaagcctttctgattgaaccaattaaagcgaaggttgaactgacggagaacgataaacgtctgctcggaatctttagcgaatatgttacctggaaccgcgtcagtaacgtactgtcacatattggctcagtgaccgccaaagattttgtccgtgtttcgggtctgacgatgaaagacatcattcgcgaagcagcacgcgaaggccatgatctgttgttcgctgataacccgtcggcggtgctgaaggagctgacaggcctcatccagaacacgattcgctccaaatggcacgaagttctggag

SEQ ID NO: 2952 - protein, 346 aa, synthetic construct
  REGION 1..346: note = variant of RNA ligase 2 from Klebsiella phage KP179
MHHHHHHGGSNMFAYYSSLENHTNAKFISKIRLAGFLSHTVEWVAREKIHGTNFSVIITPTEIVPAKRTGPILEDESFFGHEIIMKKYMDSFKKVQNMLNAMDLVSVQIFGEFAGGGIQKGFDYGDKDFYVFDILSDSGNEKSYWDDYRVESFCTTVGLKLAPLLGRGSFAELSQYPNDFKSLVNRYNELVDTVGLEMANKHVFGPQASSEEGLAEGYVLKPVYPRFFNVGTRVAIKCKNSKFSEKAFLIEPIKAKVELTENDKRLLGIFSEYVTWNRVSNVLSHIGSVTAKDFVRVSGLTMKDIIREAAREGHDLLFADNPSAVLKELTGLIQNTIRSKWHEVLE

SEQ ID NO: 2953 - DNA, 1038 bp, synthetic construct
  misc_feature 1..1038: note = variant of RNA ligase 2 from Klebsiella phage KP179
  source 1..1038: mol_type = other DNA
atgcatcaccatcaccatcacggtggcagcaacatgtttgcgtattattcaagtctggaaaaccataccaatgccaagttcattagcaagatccgtggtgcaggcttcctgagccacaccgtggaatgggtagctcgcgagaagattcatggaacgaactttagcgttatcattactccgaccgaaatcgtgccggccaaacgcacagggccgatcttggaagacgagagcttctttggtcatgaaattatcatgaaaaaatatatggactccttcaaaaaggtgcagaacatgctgaatgcgatggatcttgttagcgtgcaaatctttggcgaatttgcgggtggtggcattcagaaaggctttgattacggagacaaagatttctatgtgtttgacatcctgtctgatagcgggaacgagaaaagctactgggatgactatcgcgtcgaatcgttttgcaccactgttggtctgaaattagcgcctctgctgggacgtggtagtttcgctgaactgtcccagtacccaaacgatttcaaaagcctggtgaaccgttataatgaattggttgatacggtcggcctggagatggccaataaacacgtctttggtccgcaagcgtcttctgaagaaggcctggcagaaggctacgttcttaaacccgtctatccgcgcttctttaatgtgggtacgcgcgtggcgattaaatgcaagaactccaaattttcggagaaagcctttctgattgaaccaattaaagcgaaggttgaactgacggagaacgataaacgtctgctcggaatctttagcgaatatgttacctggaaccgcgtcagtaacgtactgtcacatattggctcagtgaccgccaaagattttgtccgtgtttcgggtctgacgatgaaagacatcattcgcgaagcagcacgcgaaggccatgatctgttgttcgctgataacccgtcggcggtgctgaaggagctgacaggcctcatccagaacacgattcgctccaaatggagtgaagttctggag

SEQ ID NO: 2954 - protein, 346 aa, synthetic construct
  REGION 1..346: note = variant of RNA ligase 2 from Klebsiella phage KP179
MHHHHHHGGSNMFAYYSSLENHTNAKFISKIRGAGFLSHTVEWVAREKIHGTNFSVIITPTEIVPAKRTGPILEDESFFGHEIIMKKYMDSFKKVQNMLNAMDLVSVQIFGEFAGGGIQKGFDYGDKDFYVFDILSDSGNEKSYWDDYRVESFCTTVGLKLAPLLGRGSFAELSQYPNDFKSLVNRYNELVDTVGLEMANKHVFGPQASSEEGLAEGYVLKPVYPRFFNVGTRVAIKCKNSKFSEKAFLIEPIKAKVELTENDKRLLGIFSEYVTWNRVSNVLSHIGSVTAKDFVRVSGLTMKDIIREAAREGHDLLFADNPSAVLKELTGLIQNTIRSKWSEVLE

SEQ ID NO: 2955 - DNA, 1038 bp, synthetic construct
  misc_feature 1..1038: note = variant of RNA ligase 2 from Klebsiella phage KP179
  source 1..1038: mol_type = other DNA
atgcatcaccatcaccatcacggtggcagcaacatgtttgcgtattattcaagtctggaaaaccataccaatgccaagttcattagcaagatccgtggtgcaggcttcctgagccacaccgtggaatgggtagctcgcgagaagattcatggaacgaactttagcgttatcattactccgaccgaaatcgtgccggccaaacgcacagggccgatcttggaagacgagagcttctttggtcatgaaattatcatgaaaaaatatatggactccttcaaaaaggtgcagaacatgctgaatgcgatggatcttgttagcgtgcaaatctttggcgaatttgcgggtggtggcattcagaaaggctttgattacggagacaaagatttctatgtgtttgacatcctgtctgatagcgggaacgagaaaagctactgggatgactatcgcgtcgaatcgttttgcaccactgttggtctgaaattagcgcctctgctgggacgtggtagtttcgctgaactgtcccagtacccaaacgatttcaaaagcctggtgaaccgttataatgaattggttgatacggtcggcctggagatggccaataaacacgtctttggtccgcaagcgtcttctgaagaaggcctggcagaaggctacgttcttaaacccgtctatccgcgcttctttaatgtgggtacgcgcgtggcgattaaatgcaagaactccaaattttcggagaaagcctttctgattgaaccattgaaagcgaaggttgaactgacggagaacgataaacgtctgctcggaatctttagcgaatatgttacctggaaccgcgtcagtaacgtactgtcacatattggctcagtgaccgccaaagattttgtccgtgtttcgggtctgacgatgaaagacatcattcgcgaagcagcacgcgaaggccatgatctgttgttcgctgataacccgtcggcggtgctgaaggagctgacaggcctcatccagaacacgattcgctccaaatggcacgaagttctggag

SEQ ID NO: 2956 - protein, 346 aa, synthetic construct
  REGION 1..346: note = variant of RNA ligase 2 from Klebsiella phage KP179
MHHHHHHGGSNMFAYYSSLENHTNAKFISKIRGAGFLSHTVEWVAREKIHGTNFSVIITPTEIVPAKRTGPILEDESFFGHEIIMKKYMDSFKKVQNMLNAMDLVSVQIFGEFAGGGIQKGFDYGDKDFYVFDILSDSGNEKSYWDDYRVESFCTTVGLKLAPLLGRGSFAELSQYPNDFKSLVNRYNELVDTVGLEMANKHVFGPQASSEEGLAEGYVLKPVYPRFFNVGTRVAIKCKNSKFSEKAFLIEPLKAKVELTENDKRLLGIFSEYVTWNRVSNVLSHIGSVTAKDFVRVSGLTMKDIIREAAREGHDLLFADNPSAVLKELTGLIQNTIRSKWHEVLE

SEQ ID NO: 2957 - DNA, 1038 bp, synthetic construct
  misc_feature 1..1038: note = variant of RNA ligase 2 from Klebsiella phage KP179
  source 1..1038: mol_type = other DNA
atgcatcaccatcaccatcacggtggcagcaacatgtttgcgtattattcaagtctggaaaaccataccaatgccaagttcattagcaagatccgtggtgcaggcttcctgagccacaccgtggaatgggtagctcgcgagaagattcatggaacgaactttagcgttatcattactccgaccgaaatcgtgccggccaaacgcacagggccgatcttggaagacgagagcttctttggtcatgaaattatcatgaaaaaatatatggactccttcaaaaaggtgcagaacatgctgaatgcgatggatcttgttagcgtgcaaatctttggcgaatttgcgggtggtggcattcagaaaggctttgattacggagaccctgatttctatgtgtttgacatcctgtctgatagcgggaacgagaaaagctactgggatgactatcgcgtcgaatcgttttgcaccactgttggtctgaaattagcgcctctgctgggacgtggtagtttcgctgaactgtcccagtacccaaacgatttcaaaagcctggtgaaccgttataatgaattggttgatacggtcggcctggagatggccaataaacacgtctttggtccgcaagcgtcttctgaagaaggcctggcagaaggctacgttcttaaacccgtctatccgcgcttctttaatgtgggtacgcgcgtggcgattaaatgcaagaactccaaattttcggagaaagcctttctgattgaaccaattaaagcgaaggttgaactgacggagaacgataaacgtctgctcggaatctttagcgaatatgttacctggaaccgcgtcagtaacgtactgtcacatattggctcagtgaccgccaaagattttgtccgtgtttcgggtctgacgatgaaagacatcattcgcgaagcagcacgcgaaggccatgatctgttgttcgctgataacccgtcggcggtgctgaaggagctgacaggcctcatccagaacacgattcgctccaaatggcacgaagttctggag

SEQ ID NO: 2958 - protein, 346 aa, synthetic construct
  REGION 1..346: note = variant of RNA ligase 2 from Klebsiella phage KP179
MHHHHHHGGSNMFAYYSSLENHTNAKFISKIRGAGFLSHTVEWVAREKIHGTNFSVIITPTEIVPAKRTGPILEDESFFGHEIIMKKYMDSFKKVQNMLNAMDLVSVQIFGEFAGGGIQKGFDYGDPDFYVFDILSDSGNEKSYWDDYRVESFCTTVGLKLAPLLGRGSFAELSQYPNDFKSLVNRYNELVDTVGLEMANKHVFGPQASSEEGLAEGYVLKPVYPRFFNVGTRVAIKCKNSKFSEKAFLIEPIKAKVELTENDKRLLGIFSEYVTWNRVSNVLSHIGSVTAKDFVRVSGLTMKDIIREAAREGHDLLFADNPSAVLKELTGLIQNTIRSKWHEVLE

SEQ ID NO: 2959 - DNA, 1038 bp, synthetic construct
  misc_feature 1..1038: note = variant of RNA ligase 2 from Klebsiella phage KP179
  source 1..1038: mol_type = other DNA
atgcatcaccatcaccatcacggtggcagcaacatgtttgcgtattattcaagtctggaaaaccataccaatgccaagttcattagcaagatccgtggtgcaggcttcctgagccacaccgtggaatgggtagctcgcgagaagattcatggaacgaactttagcgttatcattactccgaccgaaatcgtgccggccaaacgcacagggccgatcttggaagacgagagcttctttggtcatgaaattatcatgaaaaaatatatggactccttcaaaaaggtgcagaacatgctgaatgcgatggatcttgttagcgtgcaaatctttggcgaatttgcgggtggtggcattcagaaaggctttgattacggagacaaagatttctatgtgtttgacatcctgtctgatagcgggaacgagaaaagctactgggatgactatcgcgtcgaatcgttttgcaccactgttggtctgaaattagcgcctctgctgggacgtggtagtttcgctgaactgtcccagtacccaaacgatttcaaaagcctggtgaaccgttataatgaattggttgatacggtcggcctggagatggccaataaacacgtctttggtccgcaagcgtcttctgaagaaggcctggcagaaggctacgttcttaaacccgtctatccgcgcttctttaatgtgggtacgcgcgtggcgattaaatgcaagaactccaaattttcggagaaagcctttctgattgaaccaattgaggcgaaggttgaactgacggagaacgataaacgtctgctcggaatctttagcgaatatgttacctggaaccgcgtcagtaacgtactgtcacatattggctcagtgaccgccaaagattttgtccgtgtttcgggtctgacgatgaaagacatcattcgcgaagcagcacgcgaaggccatgatctgttgttcgctgataacccgtcggcggtgctgaaggagctgacaggcctcatccagaacacgattcgctccaaatggcacgaagttctggag

SEQ ID NO: 2960 - protein, 346 aa, synthetic construct
  REGION 1..346: note = variant of RNA ligase 2 from Klebsiella phage KP179
MHHHHHHGGSNMFAYYSSLENHTNAKFISKIRGAGFLSHTVEWVAREKIHGTNFSVIITPTEIVPAKRTGPILEDESFFGHEIIMKKYMDSFKKVQNMLNAMDLVSVQIFGEFAGGGIQKGFDYGDKDFYVFDILSDSGNEKSYWDDYRVESFCTTVGLKLAPLLGRGSFAELSQYPNDFKSLVNRYNELVDTVGLEMANKHVFGPQASSEEGLAEGYVLKPVYPRFFNVGTRVAIKCKNSKFSEKAFLIEPIEAKVELTENDKRLLGIFSEYVTWNRVSNVLSHIGSVTAKDFVRVSGLTMKDIIREAAREGHDLLFADNPSAVLKELTGLIQNTIRSKWHEVLE

SEQ ID NO: 2961 - DNA, 1038 bp, synthetic construct
  misc_feature 1..1038: note = variant of RNA ligase 2 from Klebsiella phage KP179
  source 1..1038: mol_type = other DNA
atgcatcaccatcaccatcacggtggcagcaacatgtttgcgtattattcaagtctggaaaaccataccaatgccaagttcattagcaagatccgtggtgcaggcttcctgagccacaccgtggaatgggtagctcgcgagaagattcatggaacgaactttagcgttatcattactccgaccgaaatcgtgccggccaaacgcacagggccgatcttggaagacgagagcttctttggtcatgaaattatcatgaaaaaatatatggactccttcaaaaaggtgcagaacatgctgaatgcgatggatcttgttagcgtgcaaatctttggcgaatttgcgggtggtggcattcagaaaggctttgattacggagacaaagatttctatgtgtttgacatcctgtctgatagcgggaacgagaaaagctactgggatgactatcgcgtcgaatcgttttgcaccactgttggtctgaaattagcgcctctgctgggacgtggtagtttcgctgaactgtcccagtacccaaacgatttcaaaagcctggtgaaccgttataatgaattggttgatacggtcggcctggagatggccaataaacacgtctttggtccgcaagcgtcttctgaagaaggcctggcagaaggctacgttcttaaacccgtctatccgcgcttctttaatgtgggtacgcgcgtggcgattaaatgcaagaactccaaattttcggagaaagcctttctgattgaaccaattaatgcgaaggttgaactgacggagaacgataaacgtctgctcggaatctttagcgaatatgttacctggaaccgcgtcagtaacgtactgtcacatattggctcagtgaccgccaaagattttgtccgtgtttcgggtctgacgatgaaagacatcattcgcgaagcagcacgcgaaggccatgatctgttgttcgctgataacccgtcggcggtgctgaaggagctgacaggcctcatccagaacacgattcgctccaaatggcacgaagttctggag

SEQ ID NO: 2962 - protein, 346 aa, synthetic construct
  REGION 1..346: note = variant of RNA ligase 2 from Klebsiella phage KP179
MHHHHHHGGSNMFAYYSSLENHTNAKFISKIRGAGFLSHTVEWVAREKIHGTNFSVIITPTEIVPAKRTGPILEDESFFGHEIIMKKYMDSFKKVQNMLNAMDLVSVQIFGEFAGGGIQKGFDYGDKDFYVFDILSDSGNEKSYWDDYRVESFCTTVGLKLAPLLGRGSFAELSQYPNDFKSLVNRYNELVDTVGLEMANKHVFGPQASSEEGLAEGYVLKPVYPRFFNVGTRVAIKCKNSKFSEKAFLIEPINAKVELTENDKRLLGIFSEYVTWNRVSNVLSHIGSVTAKDFVRVSGLTMKDIIREAAREGHDLLFADNPSAVLKELTGLIQNTIRSKWHEVLE

SEQ ID NO: 2963 - DNA, 1038 bp, synthetic construct
  misc_feature 1..1038: note = variant of RNA ligase 2 from Klebsiella phage KP179
  source 1..1038: mol_type = other DNA
atgcatcaccatcaccatcacggtggcagcaacatgtttgcgtattattcaagtctggaaaaccataccaatgccaagttcattagcaagatccgtggtgcaggcttcctgagccacaccgtggaatgggtagctcgcgagaagattcatggaacgaactttagcgttatcattactccgaccgaaatcgtgccggccaaacgcacagggccgatcttggaagacgagagcttctttggtcatgaaattatcatgaaaaaatatatggactccttcaaaaaggtgcagaacatgctgaatgcgatggatcttgttagcgtgcaaatctttggcgaatttgcgggtggtggcattcagaaaggctttgattacggagacaaagatttctatgtgtttgacatcctgtctgatagcgggaacgagaaaagctactgggatgactatcgcgtcgaatcgttttgcaccactgttggtctgaaattagcgcctctgctgggacgtggtagtttcgctgaactgtcccagtacccaaacgatttcaaaagcctggtgaaccgttataatgaattggttgatacggtcggcctggagatggccaataaacacgtctttggtccgcaagcgtcttctgaagaaggcctggcagaaggctacgttcttaaacccgtctatccgcgcttctttaatgtgggtacgcgcgtggcgattaaatgcaagaactccaaattttcggagaaagcctttctgattgaaccaattaaagcgaaggttgaactgacggagaacgataaacgtctgctcggaatctttagcgaatatgttacctggaaccgcgtcagtaacgtactgtcacatattggctcagtgaccgccaatgattttgtccgtgtttcgggtctgacgatgaaagacatcattcgcgaagcagcacgcgaaggccatgatctgttgttcgctgataacccgtcggcggtgctgaaggagctgacaggcctcatccagaacacgattcgctccaaatggcacgaagttctggag

SEQ ID NO: 2964 - protein, 346 aa, synthetic construct
  REGION 1..346: note = variant of RNA ligase 2 from Klebsiella phage KP179
MHHHHHHGGSNMFAYYSSLENHTNAKFISKIRGAGFLSHTVEWVAREKIHGTNFSVIITPTEIVPAKRTGPILEDESFFGHEIIMKKYMDSFKKVQNMLNAMDLVSVQIFGEFAGGGIQKGFDYGDKDFYVFDILSDSGNEKSYWDDYRVESFCTTVGLKLAPLLGRGSFAELSQYPNDFKSLVNRYNELVDTVGLEMANKHVFGPQASSEEGLAEGYVLKPVYPRFFNVGTRVAIKCKNSKFSEKAFLIEPIKAKVELTENDKRLLGIFSEYVTWNRVSNVLSHIGSVTANDFVRVSGLTMKDIIREAAREGHDLLFADNPSAVLKELTGLIQNTIRSKWHEVLE

SEQ ID NO: 2965 - DNA, 1038 bp, synthetic construct
  misc_feature 1..1038: note = variant of RNA ligase 2 from Klebsiella phage KP179
  source 1..1038: mol_type = other DNA
atgcatcaccatcaccatcacggtggcagcaacatgtttgcgtattattcaagtctggaaaaccataccaatgccaagttcattagcaagatccgtggtgcaggcttcctgagccacaccgtggaatgggtagctcgcgagaagattcatggaacgaactttagcgttatcattactccgaccgaaatcgtgccggccaaacgcacagggccgatcttggaagacgagagcttctttggtcatgaaattatcatgaaaaaatatatggactccttcaaaaaggtgcagaacatgctgaatgcgatggatcttgttagcgtgcaaatctttggcgaatttgcgggtggtggcattcagaaaggctttgattacggagacaaagatttctatgtgtttgacatcctgtctgatagcgggaacgagaaaagctactgggatgactatcgcgtcgaatcgttttgcaccactgttggtctgaaattagcgcctctgctgggacgtggtagtttcgctgaactgtcccagtacccaaacgatttcaaaagcctggtgaaccgttataatgaattggttgatacggtcggcctggagatggccaataaacacgtctttggtccgcaagcgtcttctgaagaaggcctggcagaaggctacgttcttaaacccgtctatccgcgcttctttaatgtgggtacgcgcgtggcgattaaatgcaagaactccaaattttcggagaaagcctttctgattgaaccaattaaagcgaaggttgaactgacggagaacgataaacgtctgctcggaatctttagcgaatatgttacctggaaccgcgtcagtaacgtactgtcacatattggctcagtgaccgcctcggattttgtccgtgtttcgggtctgacgatgaaagacatcattcgcgaagcagcacgcgaaggccatgatctgttgttcgctgataacccgtcggcggtgctgaaggagctgacaggcctcatccagaacacgattcgctccaaatggcacgaagttctggag

SEQ ID NO: 2966 - protein, 346 aa, synthetic construct
  REGION 1..346: note = variant of RNA ligase 2 from Klebsiella phage KP179
MHHHHHHGGSNMFAYYSSLENHTNAKFISKIRGAGFLSHTVEWVAREKIHGTNFSVIITPTEIVPAKRTGPILEDESFFGHEIIMKKYMDSFKKVQNMLNAMDLVSVQIFGEFAGGGIQKGFDYGDKDFYVFDILSDSGNEKSYWDDYRVESFCTTVGLKLAPLLGRGSFAELSQYPNDFKSLVNRYNELVDTVGLEMANKHVFGPQASSEEGLAEGYVLKPVYPRFFNVGTRVAIKCKNSKFSEKAFLIEPIKAKVELTENDKRLLGIFSEYVTWNRVSNVLSHIGSVTASDFVRVSGLTMKDIIREAAREGHDLLFADNPSAVLKELTGLIQNTIRSKWHEVLE

SEQ ID NO: 2967 - DNA, 1038 bp, synthetic construct
  misc_feature 1..1038: note = variant of RNA ligase 2 from Klebsiella phage KP179
  source 1..1038: mol_type = other DNA
atgcatcaccatcaccatcacggtggcagcaacatgtttgcgtattattcaagtctggaaaaccataccaatgccaagttcattagcgcgatccgtggtgcaggcttcctgagccacaccgtggaatgggtagctcgcgagaagattcatggaacgaactttagcgttatcattactccgaccgaaatcgtgccggccaaacgcacagggccgatcttggaagacgagagcttctttggtcatgaaattatcatgaaaaaatatatggactccttcaaaaaggtgcagaacatgctgaatgcgatggatcttgttagcgtgcaaatctttggcgaatttgcgggtggtggcattcagaaaggctttgattacggagacaaagatttctatgtgtttgacatcctgtctgatagcgggaacgagaaaagctactgggatgactatcgcgtcgaatcgttttgcaccactgttggtctgaaattagcgcctctgctgggacgtggtagtttcgctgaactgtcccagtacccaaacgatttcaaaagcctggtgaaccgttataatgaattggttgatacggtcggcctggagatggccaataaacacgtctttggtccgcaagcgtcttctgaagaaggcctggcagaaggctacgttcttaaacccgtctatccgcgcttctttaatgtgggtacgcgcgtggcgattaaatgcaagaactccaaattttcggagaaagcctttctgattgaaccaattaaagcgaaggttgaactgacggagaacgataaacgtctgctcggaatctttagcgaatatgttacctggaaccgcgtcagtaacgtactgtcacatattggctcagtgaccgccaaagattttgtccgtgtttcgggtctgacgatgaaagacatcattcgcgaagcagcacgcgaaggccatgatctgttgttcgctgataacccgtcggcggtgctgaaggagctgacaggcctcatccagaacacgattcgctccaaatggcacgaagttctggag

SEQ ID NO: 2968 - protein, 346 aa, synthetic construct
  REGION 1..346: note = variant of RNA ligase 2 from Klebsiella phage KP179
MHHHHHHGGSNMFAYYSSLENHTNAKFISAIRGAGFLSHTVEWVAREKIHGTNFSVIITPTEIVPAKRTGPILEDESFFGHEIIMKKYMDSFKKVQNMLNAMDLVSVQIFGEFAGGGIQKGFDYGDKDFYVFDILSDSGNEKSYWDDYRVESFCTTVGLKLAPLLGRGSFAELSQYPNDFKSLVNRYNELVDTVGLEMANKHVFGPQASSEEGLAEGYVLKPVYPRFFNVGTRVAIKCKNSKFSEKAFLIEPIKAKVELTENDKRLLGIFSEYVTWNRVSNVLSHIGSVTAKDFVRVSGLTMKDIIREAAREGHDLLFADNPSAVLKELTGLIQNTIRSKWHEVLE

SEQ ID NO: 2969 - DNA, 1038 bp, synthetic construct
  misc_feature 1..1038: note = variant of RNA ligase 2 from Klebsiella phage KP179
  source 1..1038: mol_type = other DNA
atgcatcaccatcaccatcacggtggcagcaacatgtttgcgtattattcaagtctggaaaaccataccaatgccaagttcattagcactatccgtggtgcaggcttcctgagccacaccgtggaatgggtagctcgcgagaagattcatggaacgaactttagcgttatcattactccgaccgaaatcgtgccggccaaacgcacagggccgatcttggaagacgagagcttctttggtcatgaaattatcatgaaaaaatatatggactccttcaaaaaggtgcagaacatgctgaatgcgatggatcttgttagcgtgcaaatctttggcgaatttgcgggtggtggcattcagaaaggctttgattacggagacaaagatttctatgtgtttgacatcctgtctgatagcgggaacgagaaaagctactgggatgactatcgcgtcgaatcgttttgcaccactgttggtctgaaattagcgcctctgctgggacgtggtagtttcgctgaactgtcccagtacccaaacgatttcaaaagcctggtgaaccgttataatgaattggttgatacggtcggcctggagatggccaataaacacgtctttggtccgcaagcgtcttctgaagaaggcctggcagaaggctacgttcttaaacccgtctatccgcgcttctttaatgtgggtacgcgcgtggcgattaaatgcaagaactccaaattttcggagaaagcctttctgattgaaccaattaaagcgaaggttgaactgacggagaacgataaacgtctgctcggaatctttagcgaatatgttacctggaaccgcgtcagtaacgtactgtcacatattggctcagtgaccgccaaagattttgtccgtgtttcgggtctgacgatgaaagacatcattcgcgaagcagcacgcgaaggccatgatctgttgttcgctgataacccgtcggcggtgctgaaggagctgacaggcctcatccagaacacgattcgctccaaatggcacgaagttctggag

SEQ ID NO: 2970 - protein, 346 aa, synthetic construct
  REGION 1..346: note = variant of RNA ligase 2 from Klebsiella phage KP179
MHHHHHHGGSNMFAYYSSLENHTNAKFISTIRGAGFLSHTVEWVAREKIHGTNFSVIITPTEIVPAKRTGPILEDESFFGHEIIMKKYMDSFKKVQNMLNAMDLVSVQIFGEFAGGGIQKGFDYGDKDFYVFDILSDSGNEKSYWDDYRVESFCTTVGLKLAPLLGRGSFAELSQYPNDFKSLVNRYNELVDTVGLEMANKHVFGPQASSEEGLAEGYVLKPVYPRFFNVGTRVAIKCKNSKFSEKAFLIEPIKAKVELTENDKRLLGIFSEYVTWNRVSNVLSHIGSVTAKDFVRVSGLTMKDIIREAAREGHDLLFADNPSAVLKELTGLIQNTIRSKWHEVLE

SEQ ID NO: 2971 - DNA, 1038 bp, synthetic construct
  misc_feature 1..1038: note = variant of RNA ligase 2 from Klebsiella phage KP179
  source 1..1038: mol_type = other DNA
atgcatcaccatcaccatcacggtggcagcaacatgtttgcgtattattcaagtctggaaaaccataccaatgccaagttcattagcaagatccgtggtgcaggcttcctgagccacaccgtggaatgggtagctcgcgagaagattcatggaacgaactttagcgttatcattactccgaccgaaatcgtgccggcccggcgcacagggccgatcttggaagacgagagcttctttggtcatgaaattatcatgaaaaaatatatggactccttcaaaaaggtgcagaacatgctgaatgcgatggatcttgttagcgtgcaaatctttggcgaatttgcgggtggtggcattcagaaaggctttgattacggagacaaagatttctatgtgtttgacatcctgtctgatagcgggaacgagaaaagctactgggatgactatcgcgtcgaatcgttttgcaccactgttggtctgaaattagcgcctctgctgggacgtggtagtttcgctgaactgtcccagtacccaaacgatttcaaaagcctggtgaaccgttataatgaattggttgatacggtcggcctggagatggccaataaacacgtctttggtccgcaagcgtcttctgaagaaggcctggcagaaggctacgttcttaaacccgtctatccgcgcttctttaatgtgggtacgcgcgtggcgattaaatgcaagaactccaaattttcggagaaagcctttctgattgaaccaattaaagcgaaggttgaactgacggagaacgataaacgtctgctcggaatctttagcgaatatgttacctggaaccgcgtcagtaacgtactgtcacatattggctcagtgaccgccaaagattttgtccgtgtttcgggtctgacgatgaaagacatcattcgcgaagcagcacgcgaaggccatgatctgttgttcgctgataacccgtcggcggtgctgaaggagctgacaggcctcatccagaacacgattcgctccaaatggcacgaagttctggag

SEQ ID NO: 2972 - protein, 346 aa, synthetic construct
  REGION 1..346: note = variant of RNA ligase 2 from Klebsiella phage KP179
MHHHHHHGGSNMFAYYSSLENHTNAKFISKIRGAGFLSHTVEWVAREKIHGTNFSVIITPTEIVPARRTGPILEDESFFGHEIIMKKYMDSFKKVQNMLNAMDLVSVQIFGEFAGGGIQKGFDYGDKDFYVFDILSDSGNEKSYWDDYRVESFCTTVGLKLAPLLGRGSFAELSQYPNDFKSLVNRYNELVDTVGLEMANKHVFGPQASSEEGLAEGYVLKPVYPRFFNVGTRVAIKCKNSKFSEKAFLIEPIKAKVELTENDKRLLGIFSEYVTWNRVSNVLSHIGSVTAKDFVRVSGLTMKDIIREAAREGHDLLFADNPSAVLKELTGLIQNTIRSKWHEVLE

SEQ ID NO: 2973 - DNA, 1038 bp, synthetic construct
  misc_feature 1..1038: note = variant of RNA ligase 2 from Klebsiella phage KP179
  source 1..1038: mol_type = other DNA
atgcatcaccatcaccatcacggtggcagcaacatgtttgcgtattattcaagtctggaaaaccataccaatgccaagttcattagcaagatccgtggtgcaggcttcctgagccacaccgtggaatgggtagctcgcgagaagattcatggaacgaactttagcgttatcattactccgaccgaaatcgtgccggccaaacgcacagggccgatcttggaagacgagagcttctttggtcatgaaattatcatgttgaaatatatggactccttcaaaaaggtgcagaacatgctgaatgcgatggatcttgttagcgtgcaaatctttggcgaatttgcgggtggtggcattcagaaaggctttgattacggagacaaagatttctatgtgtttgacatcctgtctgatagcgggaacgagaaaagctactgggatgactatcgcgtcgaatcgttttgcaccactgttggtctgaaattagcgcctctgctgggacgtggtagtttcgctgaactgtcccagtacccaaacgatttcaaaagcctggtgaaccgttataatgaattggttgatacggtcggcctggagatggccaataaacacgtctttggtccgcaagcgtcttctgaagaaggcctggcagaaggctacgttcttaaacccgtctatccgcgcttctttaatgtgggtacgcgcgtggcgattaaatgcaagaactccaaattttcggagaaagcctttctgattgaaccaattaaagcgaaggttgaactgacggagaacgataaacgtctgctcggaatctttagcgaatatgttacctggaaccgcgtcagtaacgtactgtcacatattggctcagtgaccgccaaagattttgtccgtgtttcgggtctgacgatgaaagacatcattcgcgaagcagcacgcgaaggccatgatctgttgttcgctgataacccgtcggcggtgctgaaggagctgacaggcctcatccagaacacgattcgctccaaatggcacgaagttctggag

SEQ ID NO: 2974 - protein, 346 aa, synthetic construct
  REGION 1..346: note = variant of RNA ligase 2 from Klebsiella phage KP179
MHHHHHHGGSNMFAYYSSLENHTNAKFISKIRGAGFLSHTVEWVAREKIHGTNFSVIITPTEIVPAKRTGPILEDESFFGHEIIMLKYMDSFKKVQNMLNAMDLVSVQIFGEFAGGGIQKGFDYGDKDFYVFDILSDSGNEKSYWDDYRVESFCTTVGLKLAPLLGRGSFAELSQYPNDFKSLVNRYNELVDTVGLEMANKHVFGPQASSEEGLAEGYVLKPVYPRFFNVGTRVAIKCKNSKFSEKAFLIEPIKAKVELTENDKRLLGIFSEYVTWNRVSNVLSHIGSVTAKDFVRVSGLTMKDIIREAAREGHDLLFADNPSAVLKELTGLIQNTIRSKWHEVLE

SEQ ID NO: 2975 - DNA, 1038 bp, synthetic construct
  misc_feature 1..1038: note = variant of RNA ligase 2 from Klebsiella phage KP179
  source 1..1038: mol_type = other DNA
atgcatcaccatcaccatcacggtggcagcaacatgtttgcgtattattcaagtctggaaaaccataccaatgccaagttcattagcaagatccgtggtgcaggcttcctgagccacaccgtggaatgggtagctcgcgagaagattcatggaacgaactttagcgttatcattactccgaccgaaatcgtgccggccaaacgcacagggccgatcttggaagacgagagcttctttggtcatgaaattatcatgaaaaaatatatggactccttcaaaaaggtgcagaacatgctgaatgcgatggatcttgttagcgtgcaaatctttggcgaatttgcgggtggtggcattcagaaaggctttgattacggagacaaagatttctatgtgtttgacatcctgtctgatagcgggaacgagaaaagctactgggatgactatcgcgtcgaatcgttttgcaccactgttggtctgaaattagcgcctctgatgggacgtggtagtttcgctgaactgtcccagtacccaaacgatttcaaaagcctggtgaaccgttataatgaattggttgatacggtcggcctggagatggccaataaacacgtctttggtccgcaagcgtcttctgaagaaggcctggcagaaggctacgttcttaaacccgtctatccgcgcttctttaatgtgggtacgcgcgtggcgattaaatgcaagaactccaaattttcggagaaagcctttctgattgaaccaattaaagcgaaggttgaactgacggagaacgataaacgtctgctcggaatctttagcgaatatgttacctggaaccgcgtcagtaacgtactgtcacatattggctcagtgaccgccaaagattttgtccgtgtttcgggtctgacgatgaaagacatcattcgcgaagcagcacgcgaaggccatgatctgttgttcgctgataacccgtcggcggtgctgaaggagctgacaggcctcatccagaacacgattcgctccaaatggcacgaagttctggag

SEQ ID NO: 2976 - protein, 346 aa, synthetic construct
  REGION 1..346: note = variant of RNA ligase 2 from Klebsiella phage KP179
MHHHHHHGGSNMFAYYSSLENHTNAKFISKIRGAGFLSHTVEWVAREKIHGTNFSVIITPTEIVPAKRTGPILEDESFFGHEIIMKKYMDSFKKVQNMLNAMDLVSVQIFGEFAGGGIQKGFDYGDKDFYVFDILSDSGNEKSYWDDYRVESFCTTVGLKLAPLMGRGSFAELSQYPNDFKSLVNRYNELVDTVGLEMANKHVFGPQASSEEGLAEGYVLKPVYPRFFNVGTRVAIKCKNSKFSEKAFLIEPIKAKVELTENDKRLLGIFSEYVTWNRVSNVLSHIGSVTAKDFVRVSGLTMKDIIREAAREGHDLLFADNPSAVLKELTGLIQNTIRSKWHEVLE

SEQ ID NO: 2977 - DNA, 1038 bp, synthetic construct
  misc_feature 1..1038: note = variant of RNA ligase 2 from Klebsiella phage KP179
  source 1..1038: mol_type = other DNA
atgcatcaccatcaccatcacggtggcagcaacatgtttgcgtattattcaagtctggaaaaccataccaatgccaagttcattagcaagatccgtggtgcaggcttcctgagccacaccgtggaatgggtagctcgcgagaagattcatggaacgaactttagcgttatcattactccgaccgaaatcgtgccggccaaacgcacagggccgatcttggaagacgagagcttctttggtcatgaaattatcatgaaaaaatatatggactccttcaaaaaggtgcagaacatgctgaatgcgatggatcttgttagcgtgcaaatctttggcgaatttgcgggtggtggcattcagaaaggctttgattacggagacaaagatttctatgtgtttgacatcctgtctgatagcgggaacgagaaaagctactgggatgactatcgcgtcgaatcgttttgcaccactgttggtctgaaattagcgcctctgctgggacgtggtagtttcgctgaaatgtcccagtacccaaacgatttcaaaagcctggtgaaccgttataatgaattggttgatacggtcggcctggagatggccaataaacacgtctttggtccgcaagcgtcttctgaagaaggcctggcagaaggctacgttcttaaacccgtctatccgcgcttctttaatgtgggtacgcgcgtggcgattaaatgcaagaactccaaattttcggagaaagcctttctgattgaaccaattaaagcgaaggttgaactgacggagaacgataaacgtctgctcggaatctttagcgaatatgttacctggaaccgcgtcagtaacgtactgtcacatattggctcagtgaccgccaaagattttgtccgtgtttcgggtctgacgatgaaagacatcattcgcgaagcagcacgcgaaggccatgatctgttgttcgctgataacccgtcggcggtgctgaaggagctgacaggcctcatccagaacacgattcgctccaaatggcacgaagttctggag

SEQ ID NO: 2978 - protein, 346 aa, synthetic construct
  REGION 1..346: note = variant of RNA ligase 2 from Klebsiella phage KP179
MHHHHHHGGSNMFAYYSSLENHTNAKFISKIRGAGFLSHTVEWVAREKIHGTNFSVIITPTEIVPAKRTGPILEDESFFGHEIIMKKYMDSFKKVQNMLNAMDLVSVQIFGEFAGGGIQKGFDYGDKDFYVFDILSDSGNEKSYWDDYRVESFCTTVGLKLAPLLGRGSFAEMSQYPNDFKSLVNRYNELVDTVGLEMANKHVFGPQASSEEGLAEGYVLKPVYPRFFNVGTRVAIKCKNSKFSEKAFLIEPIKAKVELTENDKRLLGIFSEYVTWNRVSNVLSHIGSVTAKDFVRVSGLTMKDIIREAAREGHDLLFADNPSAVLKELTGLIQNTIRSKWHEVLE

SEQ ID NO: 2979 - DNA, 1038 bp, synthetic construct
  misc_feature 1..1038: note = variant of RNA ligase 2 from Klebsiella phage KP179
  source 1..1038: mol_type = other DNA
atgcatcaccatcaccatcacggtggcagcaacatgtttgcgtattattcaagtctggaaaaccataccaatgccaagttcattagcaagatccgtggtgcaggcttcctgagccacaccgtggaatgggtagctcgcgagaagattcatggaacgaactttagcgttatcattactccgaccgaaatcgtgccggccaaacgcacagggccgatcttggaagacgagagcttctttggtcatgaaattatcatgaaaaaatatatggactccttcaaaaaggtgcagaacatgctgaatgcgatggatcttgttagcgtgcaaatctttggcgaatttgcgggtggtggcattcagaaaggctttgattacggagacaaagatttctatgtgtttgacatcctgtctgatagcgggaacgagaaaagctactgggatgactatcgcgtcgaatcgttttgcaccactgttggtctgaaattagcgcctctgctgggacgtggtagtttcgctgaactgtcccagtacccaaacgatttcaaaagcctggtgaaccgttataatgaattggttgatacggtcggcctggagatggccaataaacacgtctttggtccgcaagcgtcttctgaagaaggcctggcagaaggctacgttcttaaacccgtctatccgcgcttctttaatgtgggtacgcgcgtggcgattaaatgcaagaactccaaattttcggagaaagcctttctgattgaaccaattaaagcgaaggttgaactgacggagaacgataaacgtctgctcggaatctttagcgaatatgttacctggaaccgcgtcagtaacgtactgtcacatattggctcagtgaccgccaaagattttgtccgtgtttcgggtgctacgatgaaagacatcattcgcgaagcagcacgcgaaggccatgatctgttgttcgctgataacccgtcggcggtgctgaaggagctgacaggcctcatccagaacacgattcgctccaaatggcacgaagttctggag

SEQ ID NO: 2980 - protein, 346 aa, synthetic construct
  REGION 1..346: note = variant of RNA ligase 2 from Klebsiella phage KP179
MHHHHHHGGSNMFAYYSSLENHTNAKFISKIRGAGFLSHTVEWVAREKIHGTNFSVIITPTEIVPAKRTGPILEDESFFGHEIIMKKYMDSFKKVQNMLNAMDLVSVQIFGEFAGGGIQKGFDYGDKDFYVFDILSDSGNEKSYWDDYRVESFCTTVGLKLAPLLGRGSFAELSQYPNDFKSLVNRYNELVDTVGLEMANKHVFGPQASSEEGLAEGYVLKPVYPRFFNVGTRVAIKCKNSKFSEKAFLIEPIKAKVELTENDKRLLGIFSEYVTWNRVSNVLSHIGSVTAKDFVRVSGATMKDIIREAAREGHDLLFADNPSAVLKELTGLIQNTIRSKWHEVLE

SEQ ID NO: 2981 - DNA, 1038 bp, synthetic construct
  misc_feature 1..1038: note = variant of RNA ligase 2 from Klebsiella phage KP179
  source 1..1038: mol_type = other DNA
atgcatcaccatcaccatcacggtggcagcaacatgtttgcgtattattcaagtctggaaaaccataccaatgccaagttcattagcaagatccgtggtgcaggcttcctgagccacaccgtggaatgggtagctcgcgagaagattcatggaacgaactttagcgttatcattactccgaccgaaatcgtgccggccaaacgcacagggccgatcttggaagacgagagcttctttggtcatgaaattatcatgaaaaaatatatggactccttcaaaaaggtgcagaacatgctgaatgcgatggatcttgttagcgtgcaaatctttggcgaatttgcgggtggtggcattcagaaaggctttgattacggagacaaagatttctatgtgtttgacatcctgtctgatagcgggaacgagaaaagctactgggatgactatcgcgtcgaatcgttttgcaccactgttggtctgaaattagcgcctctgctgggacgtggtagtttcgctgaactgtcccagtacccaaacgatttcaaaagcctggtgaaccgttataatgaattggttgatacggtcggcctggagatggccaataaacacgtctttggtccgcaagcgtcttctgaagaaggcctggcagaaggctacgttcttaaacccgtctatccgcgcttctttaatgtgggtacgcgcgtggcgattaaatgcaagaactccaaattttcggagaaagcctttctgattgaaccaattaaagcgaaggttgaactgacggagaacgataaacgtctgctcggaatctttagcgaatatgttacctggaaccgcgtcagtaacgtactgtcacatattggctcagtgaccgccaaagattttgtccgtgtttcgggtctgacgatgaaagacatcattcgcgaagcagcacgcgaaggccatgatctggagttcgctgataacccgtcggcggtgctgaaggagctgacaggcctcatccagaacacgattcgctccaaatggcacgaagttctggag

SEQ ID NO: 2982 - protein, 346 aa, synthetic construct
  REGION 1..346: note = variant of RNA ligase 2 from Klebsiella phage KP179
MHHHHHHGGSNMFAYYSSLENHTNAKFISKIRGAGFLSHTVEWVAREKIHGTNFSVIITPTEIVPAKRTGPILEDESFFGHEIIMKKYMDSFKKVQNMLNAMDLVSVQIFGEFAGGGIQKGFDYGDKDFYVFDILSDSGNEKSYWDDYRVESFCTTVGLKLAPLLGRGSFAELSQYPNDFKSLVNRYNELVDTVGLEMANKHVFGPQASSEEGLAEGYVLKPVYPRFFNVGTRVAIKCKNSKFSEKAFLIEPIKAKVELTENDKRLLGIFSEYVTWNRVSNVLSHIGSVTAKDFVRVSGLTMKDIIREAAREGHDLEFADNPSAVLKELTGLIQNTIRSKWHEVLE

SEQ ID NO: 2983 - DNA, 1038 bp, synthetic construct
  misc_feature 1..1038: note = variant of RNA ligase 2 from Klebsiella phage KP179
  source 1..1038: mol_type = other DNA
atgcatcaccatcaccatcacggtggcagcaacatgtttgcgtattattcaagtctggaaaaccataccaatgccaagttcattagcaagatccgtggtgcaggcttcctgagccacaccgtggaatgggtagctcgcgagaagattcatggaacgaactttagcgttatcattactccgaccgaaatcgtgccggccaaacgcacagggccgatcttggaagacgagagcttctttggtcatgaaattatcatgaaaaaatatatggactccttcaaaaaggtgcagaacatgctgaatgcgatggatcttgttagcgtgcaaatctttggcgaatttgcgggtggtggcattcagaaaggctttgattacggagacaaagatttctatgtgtttgacatcctgtctgatagcgggaacgagaaaagctactgggatgactatcgcgtcgaatcgttttgcaccactgttggtctgaaattagcgcctctgctgggacgtggtagtttcgctgaactgtcccagtacccaaacgatttcaaaagcctggtgaaccgttataatgaattggttgatacggtcggcctggagatggccaataaacacgtctttggtccgcaagcgtcttctgaagaaggcctggcagaaggctacgttcttaaacccgtctatccgcgcttctttaatgtgggtacgcgcgtggcgattaaatgcaagaactccaaattttcggagaaagcctttctgattgaaccaattaaagcgaaggttgaactgacggagaacgataaacgtctgctcggaatctttagcgaatatgttacctggaaccgcgtcagtaacgtactgtcacatattggctcagtgaccgccaaagattttgtccgtgtttcgggtctgacgatgaaagacatcattcgcgaagcagcacgcgaaggccatgatctgcagttcgctgataacccgtcggcggtgctgaaggagctgacaggcctcatccagaacacgattcgctccaaatggcacgaagttctggag

SEQ ID NO: 2984 - protein, 346 aa, synthetic construct
  REGION 1..346: note = variant of RNA ligase 2 from Klebsiella phage KP179
MHHHHHHGGSNMFAYYSSLENHTNAKFISKIRGAGFLSHTVEWVAREKIHGTNFSVIITPTEIVPAKRTGPILEDESFFGHEIIMKKYMDSFKKVQNMLNAMDLVSVQIFGEFAGGGIQKGFDYGDKDFYVFDILSDSGNEKSYWDDYRVESFCTTVGLKLAPLLGRGSFAELSQYPNDFKSLVNRYNELVDTVGLEMANKHVFGPQASSEEGLAEGYVLKPVYPRFFNVGTRVAIKCKNSKFSEKAFLIEPIKAKVELTENDKRLLGIFSEYVTWNRVSNVLSHIGSVTAKDFVRVSGLTMKDIIREAAREGHDLQFADNPSAVLKELTGLIQNTIRSKWHEVLE

SEQ ID NO: 2985 - DNA, 1038 bp, synthetic construct
  misc_feature 1..1038: note = variant of RNA ligase 2 from Klebsiella phage KP179
  source 1..1038: mol_type = other DNA
atgcatcaccatcaccatcacggtggcagcaacatgtttgcgtattattcaagtctggaaaaccataccaatgccaagttcattagcaagatccgtggtgcaggcttcctgagccacaccgtggaatgggtagctcgcgagaagattcatggaacgaactttagcgttatcattactccgaccgaaatcgtgccggccaaacgcacagggccgatcttggaagacgagagcttctttggtcatgaaattatcatgaaaaaatatatggactccttcaaaaaggtgcagaacatgctgaatgcgatggatcttgttagcgtgcaaatctttggcgaatttgcgggtggtggcattcagaaaggctttgattacggagacaaagatttctatgtgtttgacatcctgtctgatagcgggaacgagaaaagctactgggatgactatcgcgtcgaatcgttttgcaccactgttggtctgaaattagcgcctctgctgggacgtggtagtttcgctgaactgtcccagtacccaaacgatttcaaaagcctggtgaaccgttataatgaattggttgatacggtcggcctggagatggccaataaacacgtctttggtccgcaagcgtcttctgaagaaggcctggcagaaggctacgttcttaaacccgtctatccgcgcttctttaatgtgggtacgcgcgtggcgattaaatgcaagaactccaaattttcggagaaagcctttctgattgaaccaattaaagcgaaggttgaactgacggagaacgataaacgtctgctcggaatctttagcgaatatgttacctggaaccgcgtcagtaacgtactgtcacatattggctcagtgaccgccaaagattttgtccgtgtttcgggtctgacgatgaaagacatcattcgcgaagcagcacgcgaaggccatgatctggtgttcgctgataacccgtcggcggtgctgaaggagctgacaggcctcatccagaacacgattcgctccaaatggcacgaagttctggag

SEQ ID NO: 2986 - protein, 346 aa, synthetic construct
  REGION 1..346: note = variant of RNA ligase 2 from Klebsiella phage KP179
MHHHHHHGGSNMFAYYSSLENHTNAKFISKIRGAGFLSHTVEWVAREKIHGTNFSVIITPTEIVPAKRTGPILEDESFFGHEIIMKKYMDSFKKVQNMLNAMDLVSVQIFGEFAGGGIQKGFDYGDKDFYVFDILSDSGNEKSYWDDYRVESFCTTVGLKLAPLLGRGSFAELSQYPNDFKSLVNRYNELVDTVGLEMANKHVFGPQASSEEGLAEGYVLKPVYPRFFNVGTRVAIKCKNSKFSEKAFLIEPIKAKVELTENDKRLLGIFSEYVTWNRVSNVLSHIGSVTAKDFVRVSGLTMKDIIREAAREGHDLVFADNPSAVLKELTGLIQNTIRSKWHEVLE

SEQ ID NO: 2987 - DNA, 1038 bp, synthetic construct
  misc_feature 1..1038: note = variant of RNA ligase 2 from Klebsiella phage KP179
  source 1..1038: mol_type = other DNA
atgcatcaccatcaccatcacggtggcagcaacatgtttgcgtattattcaagtctggaaaaccataccaatgccaagttcattagcaagatccgtggtgcaggcttcctgagccacaccgtggaatgggtagctcgcgagaagattcatggaacgaactttagcgttatcattactccgaccgaaatcgtgccggccaaacgcacagggccgatcttggaagacgagagcttctttggtcatgaaattatcatgaaaaaatatatggactccttcaaaaaggtgcagaacatgctgaatgcgatggatcttgttagcgtgcaaatctttggcgaatttgcgggtggtggcattcagaaaggctttgattacggagacaaagatttctatgtgtttgacatcctgtctgatagcgggaacgagaaaagctactgggatgactatcgcgtcgaatcgttttgcaccactgttggtctgaaattagcgcctctgctgggacgtggtagtttcgctgaactgtcccagtacccaaacgatttcaaaagcctggtgaaccgttataatgaattggttgatacggtcggcctggagatggccaataaacacgtctttggtccgcaagcgtcttctgaagaaggcctggcagaaggctacgttcttaaacccgtctatccgcgcttctttaatgtgggtacgcgcgtggcgattaaatgcaagaactccaaattttcggagaaagcctttctgattgaaccaattaaagcgaaggttgaactgacggagaacgataaacgtctgctcggaatctttagcgaatatgttacctggaaccgcgtcagtaacgtactgtcacatattggctcagtgaccgccaaagattttgtccgtgtttcgggtctgacgatgaaagacatcattcgcgaagcagcacgcgaaggccatgatctgttgttcgctgataacccgtcggcggtgtgtaaggagctgacaggcctcatccagaacacgattcgctccaaatggcacgaagttctggag

SEQ ID NO: 2988 - protein, 346 aa, synthetic construct
  REGION 1..346: note = variant of RNA ligase 2 from Klebsiella phage KP179
MHHHHHHGGSNMFAYYSSLENHTNAKFISKIRGAGFLSHTVEWVAREKIHGTNFSVIITPTEIVPAKRTGPILEDESFFGHEIIMKKYMDSFKKVQNMLNAMDLVSVQIFGEFAGGGIQKGFDYGDKDFYVFDILSDSGNEKSYWDDYRVESFCTTVGLKLAPLLGRGSFAELSQYPNDFKSLVNRYNELVDTVGLEMANKHVFGPQASSEEGLAEGYVLKPVYPRFFNVGTRVAIKCKNSKFSEKAFLIEPIKAKVELTENDKRLLGIFSEYVTWNRVSNVLSHIGSVTAKDFVRVSGLTMKDIIREAAREGHDLLFADNPSAVCKELTGLIQNTIRSKWHEVLE

SEQ ID NO: 2989 - DNA, 1038 bp, synthetic construct
  misc_feature 1..1038: note = variant of RNA ligase 2 from Klebsiella phage KP179
  source 1..1038: mol_type = other DNA
atgcatcaccatcaccatcacggtggcagcgggatgtttgcgtattattcaagtctggaaaaccataccaatgccaagttcattagcaagatccgtggtgcaggcttcctgagccacaccgtggaatgggtagctcgcgagaagattcatggaacgaactttagcgttatcattactccgaccgaaatcgtgccggccaaacgcacagggccgatcttggaagacgagagcttctttggtcatgaaattatcatgaaaaaatatatggactccttcaaaaaggtgcagaacatgctgaatgcgatggatcttgttagcgtgcaaatctttggcgaatttgcgggtggtggcattcagaaaggctttgattacggagacaaagatttctatgtgtttgacatcctgtctgatagcgggaacgagaaaagctactgggatgactatcgcgtcgaatcgttttgcaccactgttggtctgaaattagcgcctctgctgggacgtggtagtttcgctgaactgtcccagtacccaaacgatttcaaaagcctggtgaaccgttataatgaattggttgatacggtcggcctggagatggccaataaacacgtctttggtccgcaagcgtcttctgaagaaggcctggcagaaggctacgttcttaaacccgtctatccgcgcttctttaatgtgggtacgcgcgtggcgattaaatgcaagaactccaaattttcggagaaagcctttctgattgaaccaattaaagcgaaggttgaactgacggagaacgataaacgtctgctcggaatctttagcgaatatgttacctggaaccgcgtcagtaacgtactgtcacatattggctcagtgaccgccaaagattttgtccgtgtttcgggtctgacgatgaaagacatcattcgcgaagcagcacgcgaaggccatgatctgttgttcgctgataacccgtcggcggtgctgaaggagctgacaggcctcatccagaacacgattcgctccaaatggcacgaagttctggag

SEQ ID NO: 2990 - protein, 346 aa, synthetic construct
  REGION 1..346: note = variant of RNA ligase 2 from Klebsiella phage KP179
MHHHHHHGGSGMFAYYSSLENHTNAKFISKIRGAGFLSHTVEWVAREKIHGTNFSVIITPTEIVPAKRTGPILEDESFFGHEIIMKKYMDSFKKVQNMLNAMDLVSVQIFGEFAGGGIQKGFDYGDKDFYVFDILSDSGNEKSYWDDYRVESFCTTVGLKLAPLLGRGSFAELSQYPNDFKSLVNRYNELVDTVGLEMANKHVFGPQASSEEGLAEGYVLKPVYPRFFNVGTRVAIKCKNSKFSEKAFLIEPIKAKVELTENDKRLLGIFSEYVTWNRVSNVLSHIGSVTAKDFVRVSGLTMKDIIREAAREGHDLLFADNPSAVLKELTGLIQNTIRSKWHEVLE

SEQ ID NO: 2991 - DNA, 1038 bp, synthetic construct
  misc_feature 1..1038: note = variant of RNA ligase 2 from Klebsiella phage KP179
  source 1..1038: mol_type = other DNA
atgcatcaccatcaccatcacggtggcagcaacatgtttgcgtattattcaagtctggaaaaccataccaatgccaagttcattagcaagatccgtggtgcaggcttcctgagccacaccgtggaatgggtagctcgcgagaagattcatggaacgaactttagcgttatcattactccgaccgaaatcgtgccggccaaacgcacagggccgatcttggaagacgagagcttctttggtcatgaaattatcatgaaaaaatatatggactccttcaaaaaggtgcagaacatgctgaatgcgatggatcttgttagcgtgcaaatctttggcgaatttgcgggtggtggcattcagaaaggctttgattacggagacaaagatttctatgtgtttgacatcctgtctgatagcgggaacgagaaaagctactgggatgactatcgcgtcgaatcgttttgcaccactgttggtctgaaattagcgcctctgctgggacgtggtagtttcgctgaactgtcccagtacccaaacgatttcaaaagcctggtgaaccgttataatgaattggttgatacggtcggcctggagatggccaataaacacgtctttggtccgcaagcgtcttctgaagaaggcctggcagaaggctacgttcttaaacccgtctatccgcgcttcttttgggtgggtacgcgcgtggcgattaaatgcaagaactccaaattttcggagaaagcctttctgattgaaccaattaaagcgaaggttgaactgacggagaacgataaacgtctgctcggaatctttagcgaatatgttacctggaaccgcgtcagtaacgtactgtcacatattggctcagtgaccgccaaagattttgtccgtgtttcgggtctgacgatgaaagacatcattcgcgaagcagcacgcgaaggccatgatctgttgttcgctgataacccgtcggcggtgctgaaggagctgacaggcctcatccagaacacgattcgctccaaatggcacgaagttctggag

SEQ ID NO: 2992 - protein, 346 aa, synthetic construct
  REGION 1..346: note = variant of RNA ligase 2 from Klebsiella phage KP179
MHHHHHHGGSNMFAYYSSLENHTNAKFISKIRGAGFLSHTVEWVAREKIHGTNFSVIITPTEIVPAKRTGPILEDESFFGHEIIMKKYMDSFKKVQNMLNAMDLVSVQIFGEFAGGGIQKGFDYGDKDFYVFDILSDSGNEKSYWDDYRVESFCTTVGLKLAPLLGRGSFAELSQYPNDFKSLVNRYNELVDTVGLEMANKHVFGPQASSEEGLAEGYVLKPVYPRFFWVGTRVAIKCKNSKFSEKAFLIEPIKAKVELTENDKRLLGIFSEYVTWNRVSNVLSHIGSVTAKDFVRVSGLTMKDIIREAAREGHDLLFADNPSAVLKELTGLIQNTIRSKWHEVLE

SEQ ID NO: 2993 - DNA, 1038 bp, synthetic construct
  misc_feature 1..1038: note = variant of RNA ligase 2 from Klebsiella phage KP179
  source 1..1038: mol_type = other DNA
atgcatcaccatcaccatcacggtggcagcaacatgtttgcgtattattcaagtctggaaaaccataccaatgccaagttcattagcaagatccgtggtgcaggcttcctgagccacaccgtggaatgggtagctcgcgagaagattcatggaacgaactttagcgttatcattactccgaccgaaatcgtgccggccaaacgcacagggccgatcttggaagacgagagcttctttggtcatgaaattatcatgaaaaaatatatggactccttcaaaaaggtgcaggagatgctgaatgcgatggatcttgttagcgtgcaaatctttggcgaatttgcgggtggtggcattcagaaaggctttgattacggagacaaagatttctatgtgtttgacatcctgtctgatagcgggaacgagaaaagctactgggatgactatcgcgtcgaatcgttttgcaccactgttggtctgaaattagcgcctctgctgggacgtggtagtttcgctgaactgtcccagtacccaaacgatttcaaaagcctggtgaaccgttataatgaattggttgatacggtcggcctggagatggccaataaacacgtctttggtccgcaagcgtcttctgaagaaggcctggcagaaggctacgttcttaaacccgtctatccgcgcttctttaatgtgggtacgcgcgtggcgattaaatgcaagaactccaaattttcggagaaagcctttctgattgaaccaattaaagcgaaggttgaactgacggagaacgataaacgtctgctcggaatctttagcgaatatgttacctggaaccgcgtcagtaacgtactgtcacatattggctcagtgaccgccaaagattttgtccgtgtttcgggtctgacgatgaaagacatcattcgcgaagcagcacgcgaaggccatgatctgttgttcgctgataacccgtcggcggtgctgaaggagctgacaggcctcatccagaacacgattcgctccaaatggcacgaagttctggag

SEQ ID NO: 2994 - protein, 346 aa, synthetic construct
  REGION 1..346: note = variant of RNA ligase 2 from Klebsiella phage KP179
MHHHHHHGGSNMFAYYSSLENHTNAKFISKIRGAGFLSHTVEWVAREKIHGTNFSVIITPTEIVPAKRTGPILEDESFFGHEIIMKKYMDSFKKVQEMLNAMDLVSVQIFGEFAGGGIQKGFDYGDKDFYVFDILSDSGNEKSYWDDYRVESFCTTVGLKLAPLLGRGSFAELSQYPNDFKSLVNRYNELVDTVGLEMANKHVFGPQASSEEGLAEGYVLKPVYPRFFNVGTRVAIKCKNSKFSEKAFLIEPIKAKVELTENDKRLLGIFSEYVTWNRVSNVLSHIGSVTAKDFVRVSGLTMKDIIREAAREGHDLLFADNPSAVLKELTGLIQNTIRSKWHEVLE

SEQ ID NO: 2995 - DNA, 1038 bp, synthetic construct
  misc_feature 1..1038: note = variant of RNA ligase 2 from Klebsiella phage KP179
  source 1..1038: mol_type = other DNA
atgcatcaccatcaccatcacggtggcagcaacatgtttgcgtattattcaagtctggaaaaccataccaatgccaagttcattagcaagatccgtggtgcaggcttcctgagccacaccgtggaatgggtagctcgcgagaagattcatggaacgaactttagcgttatcattactccgaccgaaatcgtgccggccaaacgcacagggacgatcttggaagacgagagcttctttggtcatgaaattatcatgaaaaaatatatggactccttcaaaaaggtgcagaacatgctgaatgcgatggatcttgttagcgtgcaaatctttggcgaatttgcgggtggtggcattcagaaaggctttgattacggagacaaagatttctatgtgtttgacatcctgtctgatagcgggaacgagaaaagctactgggatgactatcgcgtcgaatcgttttgcaccactgttggtctgaaattagcgcctctgctgggacgtggtagtttcgctgaactgtcccagtacccaaacgatttcaaaagcctggtgaaccgttataatgaattggttgatacggtcggcctggagatggccaataaacacgtctttggtccgcaagcgtcttctgaagaaggcctggcagaaggctacgttcttaaacccgtctatccgcgcttctttaatgtgggtacgcgcgtggcgattaaatgcaagaactccaaattttcggagaaagcctttctgattgaaccaattaaagcgaaggttgaactgacggagaacgataaacgtctgctcggaatctttagcgaatatgttacctggaaccgcgtcagtaacgtactgtcacatattggctcagtgaccgccaaagattttgtccgtgtttcgggtctgacgatgaaagacatcattcgcgaagcagcacgcgaaggccatgatctgttgttcgctgataacccgtcggcggtgctgaaggagctgacaggcctcatccagaacacgattcgctccaaatggcacgaagttctggag

SEQ ID NO: 2996 - protein, 346 aa, synthetic construct
  REGION 1..346: note = variant of RNA ligase 2 from Klebsiella phage KP179
MHHHHHHGGSNMFAYYSSLENHTNAKFISKIRGAGFLSHTVEWVAREKIHGTNFSVIITPTEIVPAKRTGTILEDESFFGHEIIMKKYMDSFKKVQNMLNAMDLVSVQIFGEFAGGGIQKGFDYGDKDFYVFDILSDSGNEKSYWDDYRVESFCTTVGLKLAPLLGRGSFAELSQYPNDFKSLVNRYNELVDTVGLEMANKHVFGPQASSEEGLAEGYVLKPVYPRFFNVGTRVAIKCKNSKFSEKAFLIEPIKAKVELTENDKRLLGIFSEYVTWNRVSNVLSHIGSVTAKDFVRVSGLTMKDIIREAAREGHDLLFADNPSAVLKELTGLIQNTIRSKWHEVLE

SEQ ID NO: 2997 - DNA, 1038 bp, synthetic construct
  misc_feature 1..1038: note = variant of RNA ligase 2 from Klebsiella phage KP179
  source 1..1038: mol_type = other DNA
atgcatcaccatcaccatcacggtggcagcaacatgtttgcgtattatcctagtctggaaaaccataccaatgccaagttcattagcaagatccgtggtgcaggcttcctgagccacaccgtggaatgggtagctcgcgagaagattcatggaacgaactttagcgttatcattactccgaccgaaatcgtgccggccaaacgcacagggccgatcttggaagacgagagcttctttggtcatgaaattatcatgaaaaaatatatggactccttcaaaaaggtgcagaacatgctgaatgcgatggatcttgttagcgtgcaaatctttggcgaatttgcgggtggtggcattcagaaaggctttgattacggagacaaagatttctatgtgtttgacatcctgtctgatagcgggaacgagaaaagctactgggatgactatcgcgtcgaatcgttttgcaccactgttggtctgaaattagcgcctctgctgggacgtggtagtttcgctgaactgtcccagtacccaaacgatttcaaaagcctggtgaaccgttataatgaattggttgatacggtcggcctggagatggccaataaacacgtctttggtccgcaagcgtcttctgaagaaggcctggcagaaggctacgttcttaaacccgtctatccgcgcttctttaatgtgggtacgcgcgtggcgattaaatgcaagaactccaaattttcggagaaagcctttctgattgaaccaattaaagcgaaggttgaactgacggagaacgataaacgtctgctcggaatctttagcgaatatgttacctggaaccgcgtcagtaacgtactgtcacatattggctcagtgaccgccaaagattttgtccgtgtttcgggtctgacgatgaaagacatcattcgcgaagcagcacgcgaaggccatgatctgttgttcgctgataacccgtcggcggtgctgaaggagctgacaggcctcatccagaacacgattcgctccaaatggcacgaagttctggag

SEQ ID NO: 2998 - protein, 346 aa, synthetic construct
  REGION 1..346: note = variant of RNA ligase 2 from Klebsiella phage KP179
MHHHHHHGGSNMFAYYPSLENHTNAKFISKIRGAGFLSHTVEWVAREKIHGTNFSVIITPTEIVPAKRTGPILEDESFFGHEIIMKKYMDSFKKVQNMLNAMDLVSVQIFGEFAGGGIQKGFDYGDKDFYVFDILSDSGNEKSYWDDYRVESFCTTVGLKLAPLLGRGSFAELSQYPNDFKSLVNRYNELVDTVGLEMANKHVFGPQASSEEGLAEGYVLKPVYPRFFNVGTRVAIKCKNSKFSEKAFLIEPIKAKVELTENDKRLLGIFSEYVTWNRVSNVLSHIGSVTAKDFVRVSGLTMKDIIREAAREGHDLLFADNPSAVLKELTGLIQNTIRSKWHEVLE

SEQ ID NO: 2999 - DNA, 1038 bp, synthetic construct
  misc_feature 1..1038: note = variant of RNA ligase 2 from Klebsiella phage KP179
  source 1..1038: mol_type = other DNA
atgcatcaccatcaccatcacggtggcagcaacatgtttgcgtattattcaagtctggaaaaccataccaatgccaagttcattagcaagatccgtggtgcaggcttcctgagccacaccgtggaatgggtagctcgcgagaagattcatggaacgaactttagcgttatcattactccgaccgaaatcgtgccggccaaacgcacagggccgatcttggaagacgagagcttctttggtcatgaaattatcatgaaaaaatatatggactccttcaaaaaggtgcagaacatgctgaatgcgatggatcttgttagcgtgcaaatctttggcgaatttgcgggtggtggcattcagaaaggctttgattacggagacaaagatttctatgtgtttgacatcctgtctgatagcgggaacgagaaaagctactgggatgactatcgcgtcgaatcgttttgcaccactgttggtctgaaattagcgcctctgctgggacgtggtagtttcgctgaactgtcccagtacccaaacgatttcaaaagcctggtgaaccgttataatgaattggttgatacggtcggcctggagatggccaataaacacgtctttggtccgcaagcgtctgtggaagaaggcctggcagaaggctacgttcttaaacccgtctatccgcgcttctttaatgtgggtacgcgcgtggcgattaaatgcaagaactccaaattttcggagaaagcctttctgattgaaccaattaaagcgaaggttgaactgacggagaacgataaacgtctgctcggaatctttagcgaatatgttacctggaaccgcgtcagtaacgtactgtcacatattggctcagtgaccgccaaagattttgtccgtgtttcgggtctgacgatgaaagacatcattcgcgaagcagcacgcgaaggccatgatctgttgttcgctgataacccgtcggcggtgctgaaggagctgacaggcctcatccagaacacgattcgctccaaatggcacgaagttctggag

SEQ ID NO: 3000 - protein, 346 aa, synthetic construct
  REGION 1..346: note = variant of RNA ligase 2 from Klebsiella phage KP179
MHHHHHHGGSNMFAYYSSLENHTNAKFISKIRGAGFLSHTVEWVAREKIHGTNFSVIITPTEIVPAKRTGPILEDESFFGHEIIMKKYMDSFKKVQNMLNAMDLVSVQIFGEFAGGGIQKGFDYGDKDFYVFDILSDSGNEKSYWDDYRVESFCTTVGLKLAPLLGRGSFAELSQYPNDFKSLVNRYNELVDTVGLEMANKHVFGPQASVEEGLAEGYVLKPVYPRFFNVGTRVAIKCKNSKFSEKAFLIEPIKAKVELTENDKRLLGIFSEYVTWNRVSNVLSHIGSVTAKDFVRVSGLTMKDIIREAAREGHDLLFADNPSAVLKELTGLIQNTIRSKWHEVLE

SEQ ID NO: 3001 - DNA, 1038 bp, synthetic construct
  misc_feature 1..1038: note = variant of RNA ligase 2 from Klebsiella phage KP179
  source 1..1038: mol_type = other DNA
atgcatcaccatcaccatcacggtggcagcaacatgtttgcgtattattcaagtctggaaaaccataccaatgccaagttcattagcaagatccgtggtgcaggcttcctgagccacaccgtggaatgggtagctcgcgagaagattcatggaacgaactttagcgttatcattactccgaccgaaatcgtgccggccaaacgcacagggccgatcttggaagacgagagcttctttggtcatgaaattatcatgaaaaaatatatggactccttcaaaaaggtgcagaacatgctgaatgcgatggatcttgttagcgtgcaaatctttggcgaatttgcgggtggtggcattcagaaaggctttgattacggagacaaagatttctatgtgtttgacatcctgtctgatagcgggaacgagaaaagctactgggatgactatcgcgtcgaatcgttttgcaccactgttggtctgaaattagcgcctctgctgggacgtggtagtttcgctgaactgtcccagtacccaaacgatttcaaaagcctggtgaaccgttataatgaattggttgatacggtcggcctggagatggccaataaacacgtctttggtccgcaagcgtcttctgaagaaggcctggcagaaggctacgttcttaaacccgtctatccgcgcttctttaatgtgggtacgcgcgtggcgattaaatgcaagaacgagaaattttcggagaaagcctttctgattgaaccaattaaagcgaaggttgaactgacggagaacgataaacgtctgctcggaatctttagcgaatatgttacctggaaccgcgtcagtaacgtactgtcacatattggctcagtgaccgccaaagattttgtccgtgtttcgggtctgacgatgaaagacatcattcgcgaagcagcacgcgaaggccatgatctgttgttcgctgataacccgtcggcggtgctgaaggagctgacaggcctcatccagaacacgattcgctccaaatggcacgaagttctggag

SEQ ID NO: 3002 - protein, 346 aa, synthetic construct
  REGION 1..346: note = variant of RNA ligase 2 from Klebsiella phage KP179
MHHHHHHGGSNMFAYYSSLENHTNAKFISKIRGAGFLSHTVEWVAREKIHGTNFSVIITPTEIVPAKRTGPILEDESFFGHEIIMKKYMDSFKKVQNMLNAMDLVSVQIFGEFAGGGIQKGFDYGDKDFYVFDILSDSGNEKSYWDDYRVESFCTTVGLKLAPLLGRGSFAELSQYPNDFKSLVNRYNELVDTVGLEMANKHVFGPQASSEEGLAEGYVLKPVYPRFFNVGTRVAIKCKNEKFSEKAFLIEPIKAKVELTENDKRLLGIFSEYVTWNRVSNVLSHIGSVTAKDFVRVSGLTMKDIIREAAREGHDLLFADNPSAVLKELTGLIQNTIRSKWHEVLE

SEQ ID NO: 3003 - DNA, 1038 bp, synthetic construct
  misc_feature 1..1038: note = variant of RNA ligase 2 from Klebsiella phage KP179
  source 1..1038: mol_type = other DNA
atgcatcaccatcaccatcacggtggcagcaacatgtttgcgtattattcaagtctggaaaaccataccaatgccaagttcattagcaagatccgtggtgcaggcttcctgagccacaccgtggaatgggtagctcgcgagaagattcatggaacgaactttagcgttatcattactccgaccgaaatcgtgccggccaaacgcacagggccgatcttggaagacgagagcttctttggtcatgaaattatcatgaaaaaatatatggactccttcaaaaaggtgcagaacatgctgaatgcgatggatcttgttagcgtgcaaatctttggcgaatttgcgggtggtggcattcagaaaggctttgattacggagacaaagatttctatgtgtttgacatcctgtctgatagcgggaacgagaaaagctactgggatgactatcgcgtcgaatcgttttgcaccactgttggtctgaaattagcgcctctgctgggacgtggtagtttcgctgaactgtcccagtacccaaacgatttcaaaagcctggtgaaccgttataatgaattggttgatacggtcggcctggagatggccaataaacacgtctttggtccgcaagcgtcttctgaagaaggcctggcagaaggctacgttcttaaacccgtctatccgcgcttctttaatgtgggtacgcgcgtggcgattaaatgcaagaactccaaattttcggagaaagcctttctgattgaaccaattaaagcgaaggttgaactgacggagaacgataaacgtctgctcggaatctttggggaatatgttacctggaaccgcgtcagtaacgtactgtcacatattggctcagtgaccgccaaagattttgtccgtgtttcgggtctgacgatgaaagacatcattcgcgaagcagcacgcgaaggccatgatctgttgttcgctgataacccgtcggcggtgctgaaggagctgacaggcctcatccagaacacgattcgctccaaatggcacgaagttctggag

SEQ ID NO: 3004 - protein, 346 aa, synthetic construct
  REGION 1..346: note = variant of RNA ligase 2 from Klebsiella phage KP179
MHHHHHHGGSNMFAYYSSLENHTNAKFISKIRGAGFLSHTVEWVAREKIHGTNFSVIITPTEIVPAKRTGPILEDESFFGHEIIMKKYMDSFKKVQNMLNAMDLVSVQIFGEFAGGGIQKGFDYGDKDFYVFDILSDSGNEKSYWDDYRVESFCTTVGLKLAPLLGRGSFAELSQYPNDFKSLVNRYNELVDTVGLEMANKHVFGPQASSEEGLAEGYVLKPVYPRFFNVGTRVAIKCKNSKFSEKAFLIEPIKAKVELTENDKRLLGIFGEYVTWNRVSNVLSHIGSVTAKDFVRVSGLTMKDIIREAAREGHDLLFADNPSAVLKELTGLIQNTIRSKWHEVLE

SEQ ID NO: 3005 - DNA, 1038 bp, synthetic construct
  misc_feature 1..1038: note = variant of RNA ligase 2 from Klebsiella phage KP179
  source 1..1038: mol_type = other DNA
atgcatcaccatcaccatcacggtggcagcaacatgtttgcgtattattcaagtctggaaaaccataccaatgccaagttcattagcaagatccgtggtgcaggcttcctgagccacccggtggaatgggtagctcgcgagaagattcatggaacgaactttagcgttatcattactccgaccgaaatcgtgccggccaaacgcacagggccgatcttggaagacgagagcttctttggtcatgaaattatcatgaaaaaatatatggactccttcaaaaaggtgcagaacatgctgaatgcgatggatcttgttagcgtgcaaatctttggcgaatttgcgggtggtggcattcagaaaggctttgattacggagacaaagatttctatgtgtttgacatcctgtctgatagcgggaacgagaaaagctactgggatgactatcgcgtcgaatcgttttgcaccactgttggtctgaaattagcgcctctgctgggacgtggtagtttcgctgaactgtcccagtacccaaacgatttcaaaagcctggtgaaccgttataatgaattggttgatacggtcggcctggagatggccaataaacacgtctttggtccgcaagcgtcttctgaagaaggcctggcagaaggctacgttcttaaacccgtctatccgcgcttctttaatgtgggtacgcgcgtggcgattaaatgcaagaactccaaattttcggagaaagcctttctgattgaaccaattaaagcgaaggttgaactgacggagaacgataaacgtctgctcggaatctttagcgaatatgttacctggaaccgcgtcagtaacgtactgtcacatattggctcagtgaccgccaaagattttgtccgtgtttcgggtctgacgatgaaagacatcattcgcgaagcagcacgcgaaggccatgatctgttgttcgctgataacccgtcggcggtgctgaaggagctgacaggcctcatccagaacacgattcgctccaaatggcacgaagttctggag

SEQ ID NO: 3006 - protein, 346 aa, synthetic construct
  REGION 1..346: note = variant of RNA ligase 2 from Klebsiella phage KP179
MHHHHHHGGSNMFAYYSSLENHTNAKFISKIRGAGFLSHPVEWVAREKIHGTNFSVIITPTEIVPAKRTGPILEDESFFGHEIIMKKYMDSFKKVQNMLNAMDLVSVQIFGEFAGGGIQKGFDYGDKDFYVFDILSDSGNEKSYWDDYRVESFCTTVGLKLAPLLGRGSFAELSQYPNDFKSLVNRYNELVDTVGLEMANKHVFGPQASSEEGLAEGYVLKPVYPRFFNVGTRVAIKCKNSKFSEKAFLIEPIKAKVELTENDKRLLGIFSEYVTWNRVSNVLSHIGSVTAKDFVRVSGLTMKDIIREAAREGHDLLFADNPSAVLKELTGLIQNTIRSKWHEVLE

SEQ ID NO: 3007 - DNA, 1038 bp, synthetic construct
  misc_feature 1..1038: note = variant of RNA ligase 2 from Klebsiella phage KP179
  source 1..1038: mol_type = other DNA
atgcatcaccatcaccatcacggtggcagcaacatgtttgcgtattattcaagtctggaaaaccataccaatgccaagttcattagcaagatccgtggtgcaggcttcctgagccacagtgtggaatgggtagctcgcgagaagattcatggaacgaactttagcgttatcattactccgaccgaaatcgtgccggccaaacgcacagggccgatcttggaagacgagagcttctttggtcatgaaattatcatgaaaaaatatatggactccttcaaaaaggtgcagaacatgctgaatgcgatggatcttgttagcgtgcaaatctttggcgaatttgcgggtggtggcattcagaaaggctttgattacggagacaaagatttctatgtgtttgacatcctgtctgatagcgggaacgagaaaagctactgggatgactatcgcgtcgaatcgttttgcaccactgttggtctgaaattagcgcctctgctgggacgtggtagtttcgctgaactgtcccagtacccaaacgatttcaaaagcctggtgaaccgttataatgaattggttgatacggtcggcctggagatggccaataaacacgtctttggtccgcaagcgtcttctgaagaaggcctggcagaaggctacgttcttaaacccgtctatccgcgcttctttaatgtgggtacgcgcgtggcgattaaatgcaagaactccaaattttcggagaaagcctttctgattgaaccaattaaagcgaaggttgaactgacggagaacgataaacgtctgctcggaatctttagcgaatatgttacctggaaccgcgtcagtaacgtactgtcacatattggctcagtgaccgccaaagattttgtccgtgtttcgggtctgacgatgaaagacatcattcgcgaagcagcacgcgaaggccatgatctgttgttcgctgataacccgtcggcggtgctgaaggagctgacaggcctcatccagaacacgattcgctccaaatggcacgaagttctggag

SEQ ID NO: 3008 - protein, 346 aa, synthetic construct
  REGION 1..346: note = variant of RNA ligase 2 from Klebsiella phage KP179
MHHHHHHGGSNMFAYYSSLENHTNAKFISKIRGAGFLSHSVEWVAREKIHGTNFSVIITPTEIVPAKRTGPILEDESFFGHEIIMKKYMDSFKKVQNMLNAMDLVSVQIFGEFAGGGIQKGFDYGDKDFYVFDILSDSGNEKSYWDDYRVESFCTTVGLKLAPLLGRGSFAELSQYPNDFKSLVNRYNELVDTVGLEMANKHVFGPQASSEEGLAEGYVLKPVYPRFFNVGTRVAIKCKNSKFSEKAFLIEPIKAKVELTENDKRLLGIFSEYVTWNRVSNVLSHIGSVTAKDFVRVSGLTMKDIIREAAREGHDLLFADNPSAVLKELTGLIQNTIRSKWHEVLE

SEQ ID NO: 3009 - DNA, 1038 bp, synthetic construct
  misc_feature 1..1038: note = variant of RNA ligase 2 from Klebsiella phage KP179
  source 1..1038: mol_type = other DNA
atgcatcaccatcaccatcacggtggcagcaacatgtttgcgtattattcaagtctggaaaaccataccaatgccaagttcattagcaagatccgtggtgcaggcttcctgagccacaccgtggaatgggtagctcgcgagaagattcatggaacgaactttagcattatcattactccgaccgaaatcgtgccggccaaacgcacagggccgatcttggaagacgagagcttctttggtcatgaaattatcatgaaaaaatatatggactccttcaaaaaggtgcagaacatgctgaatgcgatggatcttgttagcgtgcaaatctttggcgaatttgcgggtggtggcattcagaaaggctttgattacggagacaaagatttctatgtgtttgacatcctgtctgatagcgggaacgagaaaagctactgggatgactatcgcgtcgaatcgttttgcaccactgttggtctgaaattagcgcctctgctgggacgtggtagtttcgctgaactgtcccagtacccaaacgatttcaaaagcctggtgaaccgttataatgaattggttgatacggtcggcctggagatggccaataaacacgtctttggtccgcaagcgtcttctgaagaaggcctggcagaaggctacgttcttaaacccgtctatccgcgcttctttaatgtgggtacgcgcgtggcgattaaatgcaagaactccaaattttcggagaaagcctttctgattgaaccaattaaagcgaaggttgaactgacggagaacgataaacgtctgctcggaatctttagcgaatatgttacctggaaccgcgtcagtaacgtactgtcacatattggctcagtgaccgccaaagattttgtccgtgtttcgggtctgacgatgaaagacatcattcgcgaagcagcacgcgaaggccatgatctgttgttcgctgataacccgtcggcggtgctgaaggagctgacaggcctcatccagaacacgattcgctccaaatggcacgaagttctggag

SEQ ID NO: 3010 - protein, 346 aa, synthetic construct
  REGION 1..346: note = variant of RNA ligase 2 from Klebsiella phage KP179
MHHHHHHGGSNMFAYYSSLENHTNAKFISKIRGAGFLSHTVEWVAREKIHGTNFSIIITPTEIVPAKRTGPILEDESFFGHEIIMKKYMDSFKKVQNMLNAMDLVSVQIFGEFAGGGIQKGFDYGDKDFYVFDILSDSGNEKSYWDDYRVESFCTTVGLKLAPLLGRGSFAELSQYPNDFKSLVNRYNELVDTVGLEMANKHVFGPQASSEEGLAEGYVLKPVYPRFFNVGTRVAIKCKNSKFSEKAFLIEPIKAKVELTENDKRLLGIFSEYVTWNRVSNVLSHIGSVTAKDFVRVSGLTMKDIIREAAREGHDLLFADNPSAVLKELTGLIQNTIRSKWHEVLE

SEQ ID NO: 3011 - DNA, 1038 bp, synthetic construct
  misc_feature 1..1038: note = variant of RNA ligase 2 from Klebsiella phage KP179
  source 1..1038: mol_type = other DNA
atgcatcaccatcaccatcacggtggcagcaacatgtttgcgtattattcaagtctggaaaaccataccaatgccaagttcattagcaagatccgtggtgcaggcttcctgagccacaccgtggaatgggtagctcgcgagaagattcatggaacgaactttagcgttatcattactccgaccgaaatcgtgccggccaaacgcacagggccgatcttggaagacgagagcttctttggtcatgaaattatcatgaaaaaatatatggactccttcaaaaaggcgcagaacatgctgaatgcgatggatcttgttagcgtgcaaatctttggcgaatttgcgggtggtggcattcagaaaggctttgattacggagacaaagatttctatgtgtttgacatcctgtctgatagcgggaacgagaaaagctactgggatgactatcgcgtcgaatcgttttgcaccactgttggtctgaaattagcgcctctgctgggacgtggtagtttcgctgaactgtcccagtacccaaacgatttcaaaagcctggtgaaccgttataatgaattggttgatacggtcggcctggagatggccaataaacacgtctttggtccgcaagcgtcttctgaagaaggcctggcagaaggctacgttcttaaacccgtctatccgcgcttctttaatgtgggtacgcgcgtggcgattaaatgcaagaactccaaattttcggagaaagcctttctgattgaaccaattaaagcgaaggttgaactgacggagaacgataaacgtctgctcggaatctttagcgaatatgttacctggaaccgcgtcagtaacgtactgtcacatattggctcagtgaccgccaaagattttgtccgtgtttcgggtctgacgatgaaagacatcattcgcgaagcagcacgcgaaggccatgatctgttgttcgctgataacccgtcggcggtgctgaaggagctgacaggcctcatccagaacacgattcgctccaaatggcacgaagttctggag

SEQ ID NO: 3012 - protein, 346 aa, synthetic construct
  REGION 1..346: note = variant of RNA ligase 2 from Klebsiella phage KP179
MHHHHHHGGSNMFAYYSSLENHTNAKFISKIRGAGFLSHTVEWVAREKIHGTNFSVIITPTEIVPAKRTGPILEDESFFGHEIIMKKYMDSFKKAQNMLNAMDLVSVQIFGEFAGGGIQKGFDYGDKDFYVFDILSDSGNEKSYWDDYRVESFCTTVGLKLAPLLGRGSFAELSQYPNDFKSLVNRYNELVDTVGLEMANKHVFGPQASSEEGLAEGYVLKPVYPRFFNVGTRVAIKCKNSKFSEKAFLIEPIKAKVELTENDKRLLGIFSEYVTWNRVSNVLSHIGSVTAKDFVRVSGLTMKDIIREAAREGHDLLFADNPSAVLKELTGLIQNTIRSKWHEVLE

SEQ ID NO: 3013 - DNA, 1038 bp, synthetic construct
  misc_feature 1..1038: note = variant of RNA ligase 2 from Klebsiella phage KP179
  source 1..1038: mol_type = other DNA
atgcatcaccatcaccatcacggtggcagcaacatgtttgcgtattattcaagtctggaaaaccataccaatgacaagttcattagcaagatccgtggtgcaggcttcctgagccacaccgtggaatgggtagctcgcgagaagattcatggaacgaactttagcgttatcattactccgaccgaaatcgtgccggccaaacgcacagggccgatcttggaagacgagagcttctttggtcatgaaattatcatgaaaaaatatatggactccttcaaaaaggttcagaacatgctgaatgcgatggatcttgttagcgtgcaaatctttggcgaatttgcgggtggtggcattcagaaaggctttgattacggagacaaagatttctatgtgtttgacatcctgtctgatagcgggaacgagaaaagctactgggatgactatcgcgtcgaatcgttttgcaccactgttggtctgaaattagcgcctctgctgggacgtggtagtttcgctgaactgtcccagtacccaaacgatttcaaaagcctggtgaaccgttataatgaattggttgatacggtcggcctggagatggccaataaacacgtctttggtccgcaagcgtcttctgaagaaggcctggcagaaggctacgttcttaaacccgtctatccgcgcttcttaaatgtgggtacgcgcgtggcgattaaatgcaagaacagcaaattttcggagaaagccggcctgattgaaccaattaaagcgaaggttgaactgacggagaacgatagccgtctgctcggaatctttagcgaatatgttacctggaaccgcgtcttgaacgtactgtcacatattggctcagtgacccagaaagattttggccgtgttgtgggtctgacgatgaaagacatcattcgcgaagcagcacgcgaaggccatgatctgttgttcgctgataacccgtcggcggtgctgaaggagctggccggcctcatccagaacacgattcgctccaaatggcacgaagttctggag

SEQ ID NO: 3014 - protein, 346 aa, synthetic construct
  REGION 1..346: note = variant of RNA ligase 2 from Klebsiella phage KP179
MHHHHHHGGSNMFAYYSSLENHTNDKFISKIRGAGFLSHTVEWVAREKIHGTNFSVIITPTEIVPAKRTGPILEDESFFGHEIIMKKYMDSFKKVQNMLNAMDLVSVQIFGEFAGGGIQKGFDYGDKDFYVFDILSDSGNEKSYWDDYRVESFCTTVGLKLAPLLGRGSFAELSQYPNDFKSLVNRYNELVDTVGLEMANKHVFGPQASSEEGLAEGYVLKPVYPRFLNVGTRVAIKCKNSKFSEKAGLIEPIKAKVELTENDSRLLGIFSEYVTWNRVLNVLSHIGSVTQKDFGRVVGLTMKDIIREAAREGHDLLFADNPSAVLKELAGLIQNTIRSKWHEVLE

SEQ ID NO: 3015 - DNA, 1038 bp, synthetic construct
  misc_feature 1..1038: note = variant of RNA ligase 2 from Klebsiella phage KP179
  source 1..1038: mol_type = other DNA
atgcatcaccatcaccatcacggtggcagcaacatgtttgcgtattattcaagtctggaaaaccataccaatgccaagttcattagcaagatcgaaggtgcaggcttcctgagccacaccgtggaatgggtagctcgcgagaagattcatggaacgaactttagcgttatcattactccgaccgaaatcgtgccggccaaacgcacagggccgatcttggaagacgagagcttctttggtcatgaaattatcatgaaaaaatatatggactccttcaaaaaggttcagaacatgctgaatgcgatggatcttgttagcgtgcaaatctttggcgaaatggcgggtggtggcattcagaaaggctttgattacggagacaaagatttctatgtgtttgacatcctgtctgatagcgggaacgagaaaagctactgggatgactatcgcgtcgaatcgttttgcaccactgttggtctgaaattagcgcctctgctgggacgtggtagtttcgctgaactgtcccagtacccaaacgatttcaaaagcctggtgaaccgttataatgaattggttgatacggtcggcctggagatggccaataaacacgtctttggtccgcaagcgtcttctgaagaaggcctggcagaaggctacgttcttaaacccgtctatccgcgcttcttaaatgtgggtacgcgcgtggcgattaaatgcaagaactccaaattttcggagaaagccggcctgattgaaccaattaaagcgaaggttgaactgacggagaacgataaacgtctgctcggaatctttagcgaatatgttacctggaaccgcgtcttgaacgtactgtcacatattggctcagtgacccagaaagattttggccgtgttgtgggactgacgatgaaagacatcattcgcgaagcagcacgcgaaggccatgatctgttgttcgctgataacccgtcggcggtgctgaaggagctggccggcctcatccagaacacgattcgctccaaatggcacgaagttctggag

SEQ ID NO: 3016 - protein, 346 aa, synthetic construct
  REGION 1..346: note = variant of RNA ligase 2 from Klebsiella phage KP179
MHHHHHHGGSNMFAYYSSLENHTNAKFISKIEGAGFLSHTVEWVAREKIHGTNFSVIITPTEIVPAKRTGPILEDESFFGHEIIMKKYMDSFKKVQNMLNAMDLVSVQIFGEMAGGGIQKGFDYGDKDFYVFDILSDSGNEKSYWDDYRVESFCTTVGLKLAPLLGRGSFAELSQYPNDFKSLVNRYNELVDTVGLEMANKHVFGPQASSEEGLAEGYVLKPVYPRFLNVGTRVAIKCKNSKFSEKAGLIEPIKAKVELTENDKRLLGIFSEYVTWNRVLNVLSHIGSVTQKDFGRVVGLTMKDIIREAAREGHDLLFADNPSAVLKELAGLIQNTIRSKWHEVLE

SEQ ID NO: 3017 - DNA, 1038 bp, synthetic construct
  misc_feature 1..1038: note = variant of RNA ligase 2 from Klebsiella phage KP179
  source 1..1038: mol_type = other DNA
atgcatcaccatcaccatcacggtggcagcaacatgtttgcgtattattcaagtctggaaaaccataccaatgacaagttcattagcaagatcgaaggtgcaggcttcctgagccacaccgtggaatgggtagctcgcgagaagattcatggaacgaactttagcgttatcattactccgaccgaaatcgtgccggccaaacgcacagggccgatcttggaagacgagagcttctttggtcatgaaattatcatgaaaaaatatatggactccttcaaaaaggttcagaacatgctgaatgcgatggatcttgttagcgtgcaaatctttggcgaattggcgggtggtggcattcagaaaggctttgattacggagacaaagatttctatgtgtttgacatcctgtctgatagcgggaacgagaaaagctactgggatgactatcgcgtcgaatcgttttgcaccactgttggtctgaaattagcgcctctgctgggacgtggtagtttcgctgaactgtcccagtacccaaacgatttcaaaagcctggtgaaccgttataatgaattggttgatacggtcggcctggagatggccaataaacacgtctttggtccgcaagcgtcttctgaagaaggcctggcagaaggctacgttcttaaacccgtctatccgcgcttctttaatgtgggtacgcgcgtggcgattaaatgcaagaacgaaaaattttcggagaaagccggcctgattgaaccaattaaagcgaaggttgaactgacggagaacgatagccgtctgctcggaatctttagcgaatatgttacctggaaccgcgtcttgaacgtactgtcacatattggctcagtgacccagaaagattttggccgtgttgtggaactgacgatgaaagacatcattcgcgaagcagcacgcgaaggccatgatctgttgttcgctgataacccgtcggcggtgctgaaagagctggccggcctcatccagaacacgattcgctccaaatggcacgaagttctggag

SEQ ID NO: 3018 - protein, 346 aa, synthetic construct
  REGION 1..346: note = variant of RNA ligase 2 from Klebsiella phage KP179
MHHHHHHGGSNMFAYYSSLENHTNDKFISKIEGAGFLSHTVEWVAREKIHGTNFSVIITPTEIVPAKRTGPILEDESFFGHEIIMKKYMDSFKKVQNMLNAMDLVSVQIFGELAGGGIQKGFDYGDKDFYVFDILSDSGNEKSYWDDYRVESFCTTVGLKLAPLLGRGSFAELSQYPNDFKSLVNRYNELVDTVGLEMANKHVFGPQASSEEGLAEGYVLKPVYPRFFNVGTRVAIKCKNEKFSEKAGLIEPIKAKVELTENDSRLLGIFSEYVTWNRVLNVLSHIGSVTQKDFGRVVELTMKDIIREAAREGHDLLFADNPSAVLKELAGLIQNTIRSKWHEVLE

SEQ ID NO: 3019 - DNA, 1038 bp, synthetic construct
  misc_feature 1..1038: note = variant of RNA ligase 2 from Klebsiella phage KP179
  source 1..1038: mol_type = other DNA
atgcatcaccatcaccatcacggtggcagcaacatgtttgcgtattattcaagtctggaaaaccataccaatgacaagttcattagcaagatccgcggtgcaggcttcctgagccacaccgtggaatgggtagctcgcgagaagattcatggaacgaactttagcgttatcattactccgaccgaaatcgtgccggccaaacgcacagggccgatcttggaagacgagagcttctttggtcatgaaattatcatgaaaaaatatatggactccttcaaaaaggttcagaacatgctgaatgcgatggatcttgttagcgtgcaaatctttggcgaaatggcgggtggtggcattcagaaaggctttgattacggagacaaagatttctatgtgtttgacatcctgtctgatagcgggaacgagaaaagctactgggatgactatcgcgtcgaatcgttttgcaccactgttggtctgaaattagcgcctctgctgggacgtggtagtttcgctgaactgtcccagtacccaaacgatttcaaaagcctggtgaaccgttataatgaattggttgatacggtcggcctggagatggccaataaacacgtctttggtccgcaagcgtcttctgaagaaggcctggcagaaggctacgttcttaaacccgtctatccgcgcttctttaatgtgggtacgcgcgtggcgattaaatgcaagaactccaaattttcggagaaagccggcctgattgaaccaattaaagcgaaggttgaactgacggagaacgatgaacgtctgctcggaatctttagcgaatatgttacctggaaccgcgtcttgaacgtactgtcacatattggctcagtgacccagaaagattttggccgtgttgtgggtctgacgatgaaagacatcattcgcgaagcagcacgcgaaggccatgatctgttggaagctgataacccgtcggcggtgctgaaggagctggccggcctcatccagaacacgattcgctccaaatggcacgaagttctggag

SEQ ID NO: 3020 - protein, 346 aa, synthetic construct
  REGION 1..346: note = variant of RNA ligase 2 from Klebsiella phage KP179
MHHHHHHGGSNMFAYYSSLENHTNDKFISKIRGAGFLSHTVEWVAREKIHGTNFSVIITPTEIVPAKRTGPILEDESFFGHEIIMKKYMDSFKKVQNMLNAMDLVSVQIFGEMAGGGIQKGFDYGDKDFYVFDILSDSGNEKSYWDDYRVESFCTTVGLKLAPLLGRGSFAELSQYPNDFKSLVNRYNELVDTVGLEMANKHVFGPQASSEEGLAEGYVLKPVYPRFFNVGTRVAIKCKNSKFSEKAGLIEPIKAKVELTENDERLLGIFSEYVTWNRVLNVLSHIGSVTQKDFGRVVGLTMKDIIREAAREGHDLLEADNPSAVLKELAGLIQNTIRSKWHEVLE

SEQ ID NO: 3021 - DNA, 1038 bp, synthetic construct
  misc_feature 1..1038: note = variant of RNA ligase 2 from Klebsiella phage KP179
  source 1..1038: mol_type = other DNA
atgcatcaccatcaccatcacggtggcagcaacatgtttgcgtattattcaagtctggaaaaccataccaatgacaagttcattagcaagatccgcggtgcaggcttcctgagccacaccgtggaatgggtagctcgcgagaagattcatggaacgaactttagcgttatcattactccgaccgaaatcgtgccggccaaacgcacagggccgatcttggaagacgagagcttctttggtcatgaaattatcatgaaaaaatatatggactccttcaaaaaggttcagaacatgctgaatgcgatggatcttgttagcgtgcaaatctttggcgaatttgcgggtggtggcattcagaaaggctttgattacggagacccggatttctatgtgtttgacatcctgtctgatagcgggaacgagaaaagctactgggatgactatcgcgtcgaatcgttttgcaccactgttggtctgaaattagcgcctctgctgggacgtggtagtttcgctgaactgtcccagtacccaaacgatttcaaaagcctggtgaaccgttataatgaattggttgatacggtcggcctggagatggccaataaacacgtctttggtccgcaagcgtcttctgaagaaggcctggcagaaggctacgttcttaaacccgtctatccgcgcttcttaaatgtgggtacgcgcgtggcgattaaatgcaagaacagcaaattttcggagaaagcctttctgattgaaccaattaaagcgaaggttgaactgacggagaacgatagccgtctgctcggaatctttagcgaatatgttacctggaaccgcgtcttgaacgtactgtcacatattggctcagtgacccagaaagattttggccgtgttgtggaactgacgatgaaagacatcattcgcgaagcagcacgcgaaggccatgatctgttggaagctgataacccgtcggcggtgctgaaggagctggccggcctcatccagaacacgattcgctccaaatggcacgaagttctggag

SEQ ID NO: 3022 - protein, 346 aa, synthetic construct
  REGION 1..346: note = variant of RNA ligase 2 from Klebsiella phage KP179
MHHHHHHGGSNMFAYYSSLENHTNDKFISKIRGAGFLSHTVEWVAREKIHGTNFSVIITPTEIVPAKRTGPILEDESFFGHEIIMKKYMDSFKKVQNMLNAMDLVSVQIFGEFAGGGIQKGFDYGDPDFYVFDILSDSGNEKSYWDDYRVESFCTTVGLKLAPLLGRGSFAELSQYPNDFKSLVNRYNELVDTVGLEMANKHVFGPQASSEEGLAEGYVLKPVYPRFLNVGTRVAIKCKNSKFSEKAFLIEPIKAKVELTENDSRLLGIFSEYVTWNRVLNVLSHIGSVTQKDFGRVVELTMKDIIREAAREGHDLLEADNPSAVLKELAGLIQNTIRSKWHEVLE

SEQ ID NO: 3023 - DNA, 1038 bp, synthetic construct
  misc_feature 1..1038: note = variant of RNA ligase 2 from Klebsiella phage KP179
  source 1..1038: mol_type = other DNA
atgcatcaccatcaccatcacggtggcagcaacatgtttgcgtattattcaagtctggaaaaccataccaatgacaagttcattagcaagatccgtggtgcaggcttcctgagccacaccgtggaatgggtagctcgcgagaagattcatggaacgaactttagcgttatcattactccgaccgaaatcgtgccggccaaacgcacagggccgatcttggaagacgagagcttctttggtcatgaaattatcatgaaaaaatatatggactccttcaaaaaggttcagaacatgctgaatgcgatggatcttgttagcgtgcaaatctttggcgaaatggcgggtggtggcattcagaaaggctttgattacggagacaaagatttctatgtgtttgacatcctgtctgatagcgggaacgagaaaagctactgggatgactatcgcgtcgaatcgttttgcaccactgttggtctgaaattagcgcctctgctgggacgtggtagtttcgctgaactgtcccagtacccaaacgatttcaaaagcctggtgaaccgttataatgaattggttgatacggtcggcctggagatggccaataaacacgtctttggtccgcaagcgtcttctgaagaaggcctggcagaaggctacgttcttaaacccgtctatccgcgcttcttaaatgtgggtacgcgcgtggcgattaaatgcaagaacagcaaattttcggagaaagccggcctgattgaaccaattaaagcgaaggttgaactgacggagaacgataaacgtctgctcggaatctttagcgaatatgttacctggaaccgcgtcttgaacgtactgtcacatattggctcagtgacccagaaagattttggccgtgttgtgggtctgacgatgaaagacatcattcgcgaagcagcacgcgaaggccatgatctgttgttcgctgataacccgtcggcggtgctggaagagctggccggcctcatccagaacacgattcgctccaaatggcacgaagttctggag

SEQ ID NO: 3024 - protein, 346 aa, synthetic construct
  REGION 1..346: note = variant of RNA ligase 2 from Klebsiella phage KP179
MHHHHHHGGSNMFAYYSSLENHTNDKFISKIRGAGFLSHTVEWVAREKIHGTNFSVIITPTEIVPAKRTGPILEDESFFGHEIIMKKYMDSFKKVQNMLNAMDLVSVQIFGEMAGGGIQKGFDYGDKDFYVFDILSDSGNEKSYWDDYRVESFCTTVGLKLAPLLGRGSFAELSQYPNDFKSLVNRYNELVDTVGLEMANKHVFGPQASSEEGLAEGYVLKPVYPRFLNVGTRVAIKCKNSKFSEKAGLIEPIKAKVELTENDKRLLGIFSEYVTWNRVLNVLSHIGSVTQKDFGRVVGLTMKDIIREAAREGHDLLFADNPSAVLEELAGLIQNTIRSKWHEVLE

SEQ ID NO: 3025 - DNA, 1038 bp, synthetic construct
  misc_feature 1..1038: note = variant of RNA ligase 2 from Klebsiella phage KP179
  source 1..1038: mol_type = other DNA
atgcatcaccatcaccatcacggtggcagcaacatgtttgcgtattattcaagtctggaaaaccataccaatgccaagttcattagcaagatccgtggtgcaggcttcctgagccacaccgtggaatgggtagctcgcgagaagattcatggaacgaactttagcgttatcattactccgaccgaaatcgtgccggccaaacgcacagggccgatcttggaagacgagagcttctttggtcatgaaattatcatgaaaaaatatatggactccttcaaaaaggttcagaacatgctgaatgcgatggatcttgttagcgtgcaaatctttggcgaatttgcgggtggtggcattcagaaaggctttgattacggagacaaagatttctatgtgtttgacatcctgtctgatagcgggaacgagaaaagctactgggatgactatcgcgtcgaatcgttttgcaccactgttggtctgaaattagcgcctctgctgggacgtggtagtttcgctgaactgtcccagtacccaaacgatttcaaaagcctggtgaaccgttataatgaattggttgatacggtcggcctggagatggccaataaacacgtctttggtccgcaagcgtcttctgaagaaggcctggcagaaggctacgttcttaaacccgtctatccgcgcttcttaaatgtgggtacgcgcgtggcgattaaatgcaagaacgaaaaattttcggagaaagcctttctgattgaaccaattaaagcgaaggttgaactgacggagaacgatgaacgtctgctcggaatctttagcgaatatgttacctggaaccgcgtcttgaacgtactgtcacatattggctcagtgacccagaaagattttggccgtgttgtgggtctgacgatgaaagacatcattcgcgaagcagcacgcgaaggccatgatctgttgtttgctgataacccgtcggcggtgctgaaggagctggccggcctcatccagaacacgattcgctccaaatggcacgaagttctggag

SEQ ID NO: 3026 - protein, 346 aa, synthetic construct
  REGION 1..346: note = variant of RNA ligase 2 from Klebsiella phage KP179
MHHHHHHGGSNMFAYYSSLENHTNAKFISKIRGAGFLSHTVEWVAREKIHGTNFSVIITPTEIVPAKRTGPILEDESFFGHEIIMKKYMDSFKKVQNMLNAMDLVSVQIFGEFAGGGIQKGFDYGDKDFYVFDILSDSGNEKSYWDDYRVESFCTTVGLKLAPLLGRGSFAELSQYPNDFKSLVNRYNELVDTVGLEMANKHVFGPQASSEEGLAEGYVLKPVYPRFLNVGTRVAIKCKNEKFSEKAFLIEPIKAKVELTENDERLLGIFSEYVTWNRVLNVLSHIGSVTQKDFGRVVGLTMKDIIREAAREGHDLLFADNPSAVLKELAGLIQNTIRSKWHEVLE

SEQ ID NO: 3027 - DNA, 1038 bp, synthetic construct
  misc_feature 1..1038: note = variant of RNA ligase 2 from Klebsiella phage KP179
  source 1..1038: mol_type = other DNA
atgcatcaccatcaccatcacggtggcagcaacatgtttgcgtattattcaagtctggaaaaccataccaatgccaagttcattagcaagatccgtggtgcaggcttcctgagccacaccgtggaatgggtagctcgcgagaagattcatggaacgaactttagcgttatcattactccgaccgaaatcgtgccggccaaacgcacagggccgatcttggaagacgagagcttctttggtcatgaaattatcatgaaaaaatatatggactccttcaaaaaggttcagaacatgctgaatgcgatggatcttgttagcgtgcaaatctttggcgaatttgcgggtggtggcattcagaaaggctttgattacggagacaaagatttctatgtgtttgacatcctgtctgatagcgggaacgagaaaagctactgggatgactatcgcgtcgaatcgttttgcaccactgttggtctgaaattagcgcctctgctgggacgtggtagtttcgctgaactgtcccagtacccaaacgatttcaaaagcctggtgaaccgttataatgaattggttgatacggtcggcctggagatggccaataaacacgtctttggtccgcaagcgtcttctgaagaaggcctggcagaaggctacgttcttaaacccgtctatccgcgcttctttaatgtgggtacgcgcgtggcgattaaatgcaagaactccaaattttcggagaaagcctttctgattgaaccaattaaagcgaaggttgaactgacggagaacgatagccgtctgctcggaatctttagcgaatatgttacctggaaccgcgtcttgaacgtactgtcacatattggctcagtgacccagaaagattttggccgtgttgtggaactgacgatgaaagacatcattcgcgaagcagcacgcgaaggccatgatctgttggaagctgataacccgtcggcggtgctggaagagctggccggcctcatccagaacacgattcgctccaaatggcacgaagttctggag

SEQ ID NO: 3028 - protein, 346 aa, synthetic construct
  REGION 1..346: note = variant of RNA ligase 2 from Klebsiella phage KP179
MHHHHHHGGSNMFAYYSSLENHTNAKFISKIRGAGFLSHTVEWVAREKIHGTNFSVIITPTEIVPAKRTGPILEDESFFGHEIIMKKYMDSFKKVQNMLNAMDLVSVQIFGEFAGGGIQKGFDYGDKDFYVFDILSDSGNEKSYWDDYRVESFCTTVGLKLAPLLGRGSFAELSQYPNDFKSLVNRYNELVDTVGLEMANKHVFGPQASSEEGLAEGYVLKPVYPRFFNVGTRVAIKCKNSKFSEKAFLIEPIKAKVELTENDSRLLGIFSEYVTWNRVLNVLSHIGSVTQKDFGRVVELTMKDIIREAAREGHDLLEADNPSAVLEELAGLIQNTIRSKWHEVLE

SEQ ID NO: 3029 - DNA, 1038 bp, synthetic construct
  misc_feature 1..1038: note = variant of RNA ligase 2 from Klebsiella phage KP179
  source 1..1038: mol_type = other DNA
atgcatcaccatcaccatcacggtggcagcaacatgtttgcgtattattcaagtctggaaaaccataccaatgacaagttcattagcaagatccgtggtgcaggcttcctgagccacaccgtggaatgggtagctcgcgagaagattcatggaacgaactttagcgttatcattactccgaccgaaatcgtgccggccaaacgcacagggccgatcttggaagacgagagcttctttggtcatgaaattatcatgaaaaaatatatggactccttcaaaaaggttcagaacatgctgaatgcgatggatcttgttagcgtgcaaatctttggcgaaatggcgggtggtggcattcagaaaggctttgattacggagacaaagatttctatgtgtttgacatcctgtctgatagcgggaacgagaaaagctactgggatgactatcgcgtcgaatcgttttgcaccactgttggtctgaaattagcgcctctgctgggacgtggtagtttcgctgaactgtcccagtacccaaacgatttcaaaagcctggtgaaccgttataatgaattggttgatacggtcggcctggagatggccaataaacacgtctttggtccgcaagcgtcttctgaagaaggcctggcagaaggctacgttcttaaacccgtctatccgcgcttctttaatgtgggtacgcgcgtggcgattaaatgcaagaacgaaaaattttcggagaaagccggcctgattgaaccaattaaagcgaaggttgaactgacggagaacgatagccgtctgctcggaatctttagcgaatatgttacctggaaccgcgtcttgaacgtactgtcacatattggctcagtgacccagaaagattttggccgtgttgtgggactgacgatgaaagacatcattcgcgaagcagcacgcgaaggccatgatctgttggaagctgataacccgtcggcggtgctgaaggagctggccggcctcatccagaacacgattcgctccaaatggcacgaagttctggag

SEQ ID NO: 3030 - protein, 346 aa, synthetic construct
  REGION 1..346: note = variant of RNA ligase 2 from Klebsiella phage KP179
MHHHHHHGGSNMFAYYSSLENHTNDKFISKIRGAGFLSHTVEWVAREKIHGTNFSVIITPTEIVPAKRTGPILEDESFFGHEIIMKKYMDSFKKVQNMLNAMDLVSVQIFGEMAGGGIQKGFDYGDKDFYVFDILSDSGNEKSYWDDYRVESFCTTVGLKLAPLLGRGSFAELSQYPNDFKSLVNRYNELVDTVGLEMANKHVFGPQASSEEGLAEGYVLKPVYPRFFNVGTRVAIKCKNEKFSEKAGLIEPIKAKVELTENDSRLLGIFSEYVTWNRVLNVLSHIGSVTQKDFGRVVGLTMKDIIREAAREGHDLLEADNPSAVLKELAGLIQNTIRSKWHEVLE

SEQ ID NO: 3031 - DNA, 1038 bp, synthetic construct
  misc_feature 1..1038: note = variant of RNA ligase 2 from Klebsiella phage KP179
  source 1..1038: mol_type = other DNA
atgcatcaccatcaccatcacggtggcagcaacatgtttgcgtattattcaagtctggaaaaccataccaatgacaagttcattagcaagatccgcggtgcaggcttcctgagccacaccgtggaatgggtagctcgcgagaagattcatggaacgaactttagcgttatcattactccgaccgaaatcgtgccggccaaacgcacagggccgatcttggaagacgagagcttctttggtcatgaaattatcatgaaaaaatatatggactccttcaaaaaggttcagaacatgctgaatgcgatggatcttgttagcgtgcaaatctttggcgaatttgcgggtggtggcattcagaaaggctttgattacggagacccggatttctatgtgtttgacatcctgtctgatagcgggaacgagaaaagctactgggatgactatcgcgtcgaatcgttttgcaccactgttggtctgaaattagcgcctctgctgggacgtggtagtttcgctgaactgtcccagtacccaaacgatttcaaaagcctggtgaaccgttataatgaattggttgatacggtcggcctggagatggccaataaacacgtctttggtccgcaagcgtcttctgaagaaggcctggcagaaggctacgttcttaaacccgtctatccgcgcttctttaatgtgggtacgcgcgtggcgattaaatgcaagaactccaaattttcggagaaagccggcctgattgaaccaattaaagcgaaggttgaactgacggagaacgataaacgtctgctcggaatctttagcgaatatgttacctggaaccgcgtcttgaacgtactgtcacatattggctcagtgacccagaaagattttggccgtgttgtggaactgacgatgaaagacatcattcgcgaagcagcacgcgaaggccatgatctgttggaagctgataacccgtcggcggtgctgaaggagctggccggcctcatccagaacacgattcgctccaaatggcacgaagttctggag

SEQ ID NO: 3032 - protein, 346 aa, synthetic construct
  REGION 1..346: note = variant of RNA ligase 2 from Klebsiella phage KP179
MHHHHHHGGSNMFAYYSSLENHTNDKFISKIRGAGFLSHTVEWVAREKIHGTNFSVIITPTEIVPAKRTGPILEDESFFGHEIIMKKYMDSFKKVQNMLNAMDLVSVQIFGEFAGGGIQKGFDYGDPDFYVFDILSDSGNEKSYWDDYRVESFCTTVGLKLAPLLGRGSFAELSQYPNDFKSLVNRYNELVDTVGLEMANKHVFGPQASSEEGLAEGYVLKPVYPRFFNVGTRVAIKCKNSKFSEKAGLIEPIKAKVELTENDKRLLGIFSEYVTWNRVLNVLSHIGSVTQKDFGRVVELTMKDIIREAAREGHDLLEADNPSAVLKELAGLIQNTIRSKWHEVLE

SEQ ID NO: 3033 - DNA, 1038 bp, synthetic construct
  misc_feature 1..1038: note = variant of RNA ligase 2 from Klebsiella phage KP179
  source 1..1038: mol_type = other DNA
atgcatcaccatcaccatcacggtggcagcaacatgtttgcgtattattcaagtctggaaaaccataccaatgccaagttcattagcaagatccgcggtgcaggcttcctgagccacaccgtggaatgggtagctcgcgagaagattcatggaacgaactttagcgttatcattactccgaccgaaatcgtgccggccaaacgcacagggccgatcttggaagacgagagcttctttggtcatgaaattatcatgaaaaaatatatggactccttcaaaaaggttcagaacatgctgaatgcgatggatcttgttagcgtgcaaatctttggcgaaatggcgggtggtggcattcagaaaggctttgattacggagacccggatttctatgtgtttgacatcctgtctgatagcgggaacgagaaaagctactgggatgactatcgcgtcgaatcgttttgcaccactgttggtctgaaattagcgcctctgctgggacgtggtagtttcgctgaactgtcccagtacccaaacgatttcaaaagcctggtgaaccgttataatgaattggttgatacggtcggcctggagatggccaataaacacgtctttggtccgcaagcgtcttctgaagaaggcctggcagaaggctacgttcttaaacccgtctatccgcgcttcttaaatgtgggtacgcgcgtggcgattaaatgcaagaactccaaattttcggagaaagcctttctgattgaaccaattaaagcgaaggttgaactgacggagaacgatgaacgtctgctcggaatctttagcgaatatgttacctggaaccgcgtcttgaacgtactgtcacatattggctcagtgacccagaaagattttggccgtgttgtggaactgacgatgaaagacatcattcgcgaagcagcacgcgaaggccatgatctgttgttcgctgataacccgtcggcggtgctgaaggagctggccggcctcatccagaacacgattcgctccaaatggcacgaagttctggag

SEQ ID NO: 3034 - protein, 346 aa, synthetic construct
  REGION 1..346: note = variant of RNA ligase 2 from Klebsiella phage KP179
MHHHHHHGGSNMFAYYSSLENHTNAKFISKIRGAGFLSHTVEWVAREKIHGTNFSVIITPTEIVPAKRTGPILEDESFFGHEIIMKKYMDSFKKVQNMLNAMDLVSVQIFGEMAGGGIQKGFDYGDPDFYVFDILSDSGNEKSYWDDYRVESFCTTVGLKLAPLLGRGSFAELSQYPNDFKSLVNRYNELVDTVGLEMANKHVFGPQASSEEGLAEGYVLKPVYPRFLNVGTRVAIKCKNSKFSEKAFLIEPIKAKVELTENDERLLGIFSEYVTWNRVLNVLSHIGSVTQKDFGRVVELTMKDIIREAAREGHDLLFADNPSAVLKELAGLIQNTIRSKWHEVLE

SEQ ID NO: 3035 - DNA, 1038 bp, synthetic construct
  misc_feature 1..1038: note = variant of RNA ligase 2 from Klebsiella phage KP179
  source 1..1038: mol_type = other DNA
atgcatcaccatcaccatcacggtggcagcaacatgtttgcgtattattcaagtctggaaaaccataccaatgacaagttcattagcaagatccgtggtgcaggcttcctgagccacaccgtggaatgggtagctcgcgagaagattcatggaacgaactttagcgttatcattactccgaccgaaatcgtgccggccaaacgcacagggccgatcttggaagacgagagcttctttggtcatgaaattatcatgaaaaaatatatggactccttcaaaaaggttcagaacatgctgaatgcgatggatcttgttagcgtgcaaatctttggcgaatttgcgggtggtggcattcagaaaggctttgattacggagacccggatttctatgtgtttgacatcctgtctgatagcgggaacgagaaaagctactgggatgactatcgcgtcgaatcgttttgcaccactgttggtctgaaattagcgcctctgctgggacgtggtagtttcgctgaactgtcccagtacccaaacgatttcaaaagcctggtgaaccgttataatgaattggttgatacggtcggcctggagatggccaataaacacgtctttggtccgcaagcgtcttctgaagaaggcctggcagaaggctacgttcttaaacccgtctatccgcgcttctttaatgtgggtacgcgcgtggcgattaaatgcaagaactccaaattttcggagaaagcctttctgattgaaccaattaaagcgaaggttgaactgacggagaacgataaacgtctgctcggaatctttagcgaatatgttacctggaaccgcgtcttgaacgtactgtcacatattggctcagtgacccagaaagattttggccgtgttgtgggtctgacgatgaaagacatcattcgcgaagcagcacgcgaaggccatgatctgttgttcgctgataacccgtcggcggtgctgaaagagctggccggcctcatccagaacacgattcgctccaaatggcacgaagttctggag

SEQ ID NO: 3036 - protein, 346 aa, synthetic construct
  REGION 1..346: note = variant of RNA ligase 2 from Klebsiella phage KP179
MHHHHHHGGSNMFAYYSSLENHTNDKFISKIRGAGFLSHTVEWVAREKIHGTNFSVIITPTEIVPAKRTGPILEDESFFGHEIIMKKYMDSFKKVQNMLNAMDLVSVQIFGEFAGGGIQKGFDYGDPDFYVFDILSDSGNEKSYWDDYRVESFCTTVGLKLAPLLGRGSFAELSQYPNDFKSLVNRYNELVDTVGLEMANKHVFGPQASSEEGLAEGYVLKPVYPRFFNVGTRVAIKCKNSKFSEKAFLIEPIKAKVELTENDKRLLGIFSEYVTWNRVLNVLSHIGSVTQKDFGRVVGLTMKDIIREAAREGHDLLFADNPSAVLKELAGLIQNTIRSKWHEVLE

SEQ ID NO: 3037 - DNA, 1038 bp, synthetic construct
  misc_feature 1..1038: note = variant of RNA ligase 2 from Klebsiella phage KP179
  source 1..1038: mol_type = other DNA
atgcatcaccatcaccatcacggtggcagcaacatgtttgcgtattattcaagtctggaaaaccataccaatgacaagttcattagcaagatccgtggtgcaggcttcctgagccacaccgtggaatgggtagctcgcgagaagattcatggaacgaactttagcgttatcattactccgaccgaaatcgtgccggccaaacgcacagggccgatcttggaagacgagagcttctttggtcatgaaattatcatgaaaaaatatatggactccttcaaaaaggttcagaacatgctgaatgcgatggatcttgttagcgtgcaaatctttggcgaatttgcgggtggtggcattcagaaaggctttgattacggagacaaagatttctatgtgtttgacatcctgtctgatagcgggaacgagaaaagctactgggatgactatcgcgtcgaatcgttttgcaccactgttggtctgaaattagcgcctctgctgggacgtggtagtttcgctgaactgtcccagtacccaaacgatttcaaaagcctggtgaaccgttataatgaattggttgatacggtcggcctggagatggccaataaacacgtctttggtccgcaagcgtcttctgaagaaggcctggcagaaggctacgttcttaaacccgtctatccgcgcttcgataatgtgggtacgcgcgtggcgattaaatgcaagaactccaaattttcggagaaagccggcctgattgaaccaattaaagcgaaggttgaactgacggagaacgatgaacgtctgctcggaatctttagcgaatatgttacctggaaccgcgtcttgaacgtactgtcacatattggctcagtgacccagaaagattttggccgtgttgtgggtctgacgatgaaagacatcattcgcgaagcagcacgcgaaggccatgatctgttgttcgctgataacccgtcggcggtgctggaagagctggccggcctcatccagaacacgattcgctccaaatggcacgaagttctggag

SEQ ID NO: 3038 - protein, 346 aa, synthetic construct
  REGION 1..346: note = variant of RNA ligase 2 from Klebsiella phage KP179
MHHHHHHGGSNMFAYYSSLENHTNDKFISKIRGAGFLSHTVEWVAREKIHGTNFSVIITPTEIVPAKRTGPILEDESFFGHEIIMKKYMDSFKKVQNMLNAMDLVSVQIFGEFAGGGIQKGFDYGDKDFYVFDILSDSGNEKSYWDDYRVESFCTTVGLKLAPLLGRGSFAELSQYPNDFKSLVNRYNELVDTVGLEMANKHVFGPQASSEEGLAEGYVLKPVYPRFDNVGTRVAIKCKNSKFSEKAGLIEPIKAKVELTENDERLLGIFSEYVTWNRVLNVLSHIGSVTQKDFGRVVGLTMKDIIREAAREGHDLLFADNPSAVLEELAGLIQNTIRSKWHEVLE

SEQ ID NO: 3039 - DNA, 1038 bp, synthetic construct
  misc_feature 1..1038: note = variant of RNA ligase 2 from Klebsiella phage KP179
  source 1..1038: mol_type = other DNA
atgcatcaccatcaccatcacggtggcagcaacatgtttgcgtattattcaagtctggaaaaccataccaatgacaagttcattagcaagatccgtggtgcaggcttcctgagccacaccgtggaatgggtagctcgcgagaagattcatggaacgaactttagcgttatcattactccgaccgaaatcgtgccggccaaacgcacagggccgatcttggaagacgagagcttctttggtcatgaaattatcatgaaaaaatatatggactccttcaaaaaggttcagaacatgctgaatgcgatggatcttgttagcgtgcaaatctttggcgaaatggcgggtggtggcattcagaaaggctttgattacggagacaaagatttctatgtgtttgacatcctgtctgatagcgggaacgagaaaagctactgggatgactatcgcgtcgaatcgttttgcaccactgttggtctgaaattagcgcctctgctgggacgtggtagtttcgctgaactgtcccagtacccaaacgatttcaaaagcctggtgaaccgttataatgaattggttgatacggtcggcctggagatggccaataaacacgtctttggtccgcaagcgtcttctgaagaaggcctggcagaaggctacgttcttaaacccgtctatccgcgcttctttaatgtgggtacgcgcgtggcgattaaatgcaagaactccaaattttcggagaaagcctttctgattgaaccaattaaagcgaaggttgaactgacggagaacgatgaacgtctgctcggaatctttagcgaatatgttacctggaaccgcgtcttgaacgtactgtcacatattggctcagtgacccagaaagattttggccgtgttgtggaactgacgatgaaagacatcattcgcgaagcagcacgcgaaggccatgatctgttgttcgctgataacccgtcggcggtgctgaaagagctggccggcctcatccagaacacgattcgctccaaatggcacgaagttctggag

SEQ ID NO: 3040 - protein, 346 aa, synthetic construct
  REGION 1..346: note = variant of RNA ligase 2 from Klebsiella phage KP179
MHHHHHHGGSNMFAYYSSLENHTNDKFISKIRGAGFLSHTVEWVAREKIHGTNFSVIITPTEIVPAKRTGPILEDESFFGHEIIMKKYMDSFKKVQNMLNAMDLVSVQIFGEMAGGGIQKGFDYGDKDFYVFDILSDSGNEKSYWDDYRVESFCTTVGLKLAPLLGRGSFAELSQYPNDFKSLVNRYNELVDTVGLEMANKHVFGPQASSEEGLAEGYVLKPVYPRFFNVGTRVAIKCKNSKFSEKAFLIEPIKAKVELTENDERLLGIFSEYVTWNRVLNVLSHIGSVTQKDFGRVVELTMKDIIREAAREGHDLLFADNPSAVLKELAGLIQNTIRSKWHEVLE

SEQ ID NO: 3041 - DNA, 1038 bp, synthetic construct
  misc_feature 1..1038: note = variant of RNA ligase 2 from Klebsiella phage KP179
  source 1..1038: mol_type = other DNA
atgcatcaccatcaccatcacggtggcagcaacatgtttgcgtattattcaagtctggaaaaccataccaatgccaagttcattagcaagatcgaaggtgcaggcttcctgagccacaccgtggaatgggtagctcgcgagaagattcatggaacgaactttagcgttatcattactccgaccgaaatcgtgccggccaaacgcacagggccgatcttggaagacgagagcttctttggtcatgaaattatcatgaaaaaatatatggactccttcaaaaaggttcagaacatgctgaatgcgatggatcttgttagcgtgcaaatctttggcgaaatggcgggtggtggcattcagaaaggctttgattacggagacaaagatttctatgtgtttgacatcctgtctgatagcgggaacgagaaaagctactgggatgactatcgcgtcgaatcgttttgcaccactgttggtctgaaattagcgcctctgctgggacgtggtagtttcgctgaactgtcccagtacccaaacgatttcaaaagcctggtgaaccgttataatgaattggttgatacggtcggcctggagatggccaataaacacgtctttggtccgcaagcgtcttctgaagaaggcctggcagaaggctacgttcttaaacccgtctatccgcgcttctttaatgtgggtacgcgcgtggcgattaaatgcaagaactccaaattttcggagaaagcctttctgattgaaccaattaaagcgaaggttgaactgacggagaacgatagccgtctgctcggaatctttagcgaatatgttacctggaaccgcgtcttgaacgtactgtcacatattggctcagtgacccagaaagattttggccgtgttgtgggtctgacgatgaaagacatcattcgcgaagcagcacgcgaaggccatgatctgttggaagctgataacccgtcggcggtgctgaaagagctggccggcctcatccagaacacgattcgctccaaatggcacgaagttctggag

SEQ ID NO: 3042 - protein, 346 aa, synthetic construct
  REGION 1..346: note = variant of RNA ligase 2 from Klebsiella phage KP179
MHHHHHHGGSNMFAYYSSLENHTNAKFISKIEGAGFLSHTVEWVAREKIHGTNFSVIITPTEIVPAKRTGPILEDESFFGHEIIMKKYMDSFKKVQNMLNAMDLVSVQIFGEMAGGGIQKGFDYGDKDFYVFDILSDSGNEKSYWDDYRVESFCTTVGLKLAPLLGRGSFAELSQYPNDFKSLVNRYNELVDTVGLEMANKHVFGPQASSEEGLAEGYVLKPVYPRFFNVGTRVAIKCKNSKFSEKAFLIEPIKAKVELTENDSRLLGIFSEYVTWNRVLNVLSHIGSVTQKDFGRVVGLTMKDIIREAAREGHDLLEADNPSAVLKELAGLIQNTIRSKWHEVLE

SEQ ID NO: 3043 - DNA, 1038 bp, synthetic construct
  misc_feature 1..1038: note = variant of RNA ligase 2 from Klebsiella phage KP179
  source 1..1038: mol_type = other DNA
atgcatcaccatcaccatcacggtggcagcaacatgtttgcgtattattcaagtctggaaaaccataccaatgacaagttcattagcaagatcgaaggtgcaggcttcctgagccacaccgtggaatgggtagctcgcgagaagattcatggaacgaactttagcgttatcattactccgaccgaaatcgtgccggccaaacgcacagggccgatcttggaagacgagagcttctttggtcatgaaattatcatgaaaaaatatatggactccttcaaaaaggttcagaacatgctgaatgcgatggatcttgttagcgtgcaaatctttggcgaatttgcgggtggtggcattcagaaaggctttgattacggagacaaagatttctatgtgtttgacatcctgtctgatagcgggaacgagaaaagctactgggatgactatcgcgtcgaatcgttttgcaccactgttggtctgaaattagcgcctctgctgggacgtggtagtttcgctgaactgtcccagtacccaaacgatttcaaaagcctggtgaaccgttataatgaattggttgatacggtcggcctggagatggccaataaacacgtctttggtccgcaagcgtcttctgaagaaggcctggcagaaggctacgttcttaaacccgtctatccgcgcttctttaatgtgggtacgcgcgtggcgattaaatgcaagaacgaaaaattttcggagaaagcctttctgattgaaccaattaaagcgaaggttgaactgacggagaacgatagccgtctgctcggaatctttagcgaatatgttacctggaaccgcgtcttgaacgtactgtcacatattggctcagtgacccagaaagattttggccgtgttgtgggtctgacgatgaaagacatcattcgcgaagcagcacgcgaaggccatgatctgttgttcgctgataacccgtcggcggtgctggaagagctggccggcctcatccagaacacgattcgctccaaatggcacgaagttctggag

SEQ ID NO: 3044 - protein, 346 aa, synthetic construct
  REGION 1..346: note = variant of RNA ligase 2 from Klebsiella phage KP179
MHHHHHHGGSNMFAYYSSLENHTNDKFISKIEGAGFLSHTVEWVAREKIHGTNFSVIITPTEIVPAKRTGPILEDESFFGHEIIMKKYMDSFKKVQNMLNAMDLVSVQIFGEFAGGGIQKGFDYGDKDFYVFDILSDSGNEKSYWDDYRVESFCTTVGLKLAPLLGRGSFAELSQYPNDFKSLVNRYNELVDTVGLEMANKHVFGPQASSEEGLAEGYVLKPVYPRFFNVGTRVAIKCKNEKFSEKAFLIEPIKAKVELTENDSRLLGIFSEYVTWNRVLNVLSHIGSVTQKDFGRVVGLTMKDIIREAAREGHDLLFADNPSAVLEELAGLIQNTIRSKWHEVLE

SEQ ID NO: 3045 - DNA, 1038 bp, synthetic construct
  misc_feature 1..1038: note = variant of RNA ligase 2 from Klebsiella phage KP179
  source 1..1038: mol_type = other DNA
atgcatcaccatcaccatcacggtggcagcaacatgtttgcgtattattcaagtctggaaaaccataccaatgccaagttcattagcaagatccgcggtgcaggcttcctgagccacaccgtggaatgggtagctcgcgagaagattcatggaacgaactttagcgttatcattactccgaccgaaatcgtgccggccaaacgcacagggccgatcttggaagacgagagcttctttggtcatgaaattatcatgaaaaaatatatggactccttcaaaaaggttcagaacatgctgaatgcgatggatcttgttagcgtgcaaatctttggcgaaatggcgggtggtggcattcagaaaggctttgattacggagacaaagatttctatgtgtttgacatcctgtctgatagcgggaacgagaaaagctactgggatgactatcgcgtcgaatcgttttgcaccactgttggtctgaaattagcgcctctgctgggacgtggtagtttcgctgaactgtcccagtacccaaacgatttcaaaagcctggtgaaccgttataatgaattggttgatacggtcggcctggagatggccaataaacacgtctttggtccgcaagcgtcttctgaagaaggcctggcagaaggctacgttcttaaacccgtctatccgcgcttctttaatgtgggtacgcgcgtggcgattaaatgcaagaactccaaattttcggagaaagcctttctgattgaaccaattaaagcgaaggttgaactgacggagaacgatgaacgtctgctcggaatctttagcgaatatgttacctggaaccgcgtcttgaacgtactgtcacatattggctcagtgacccagaaagattttggccgtgttgtgggtctgacgatgaaagacatcattcgcgaagcagcacgcgaaggccatgatctgttgtttgctgataacccgtcggcggtgctggaagagctggccggcctcatccagaacacgattcgctccaaatggcacgaagttctggag

SEQ ID NO: 3046 - protein, 346 aa, synthetic construct
  REGION 1..346: note = variant of RNA ligase 2 from Klebsiella phage KP179
MHHHHHHGGSNMFAYYSSLENHTNAKFISKIRGAGFLSHTVEWVAREKIHGTNFSVIITPTEIVPAKRTGPILEDESFFGHEIIMKKYMDSFKKVQNMLNAMDLVSVQIFGEMAGGGIQKGFDYGDKDFYVFDILSDSGNEKSYWDDYRVESFCTTVGLKLAPLLGRGSFAELSQYPNDFKSLVNRYNELVDTVGLEMANKHVFGPQASSEEGLAEGYVLKPVYPRFFNVGTRVAIKCKNSKFSEKAFLIEPIKAKVELTENDERLLGIFSEYVTWNRVLNVLSHIGSVTQKDFGRVVGLTMKDIIREAAREGHDLLFADNPSAVLEELAGLIQNTIRSKWHEVLE

SEQ ID NO: 3047 - DNA, 1038 bp, synthetic construct
  misc_feature 1..1038: note = variant of RNA ligase 2 from Klebsiella phage KP179
  source 1..1038: mol_type = other DNA
atgcatcaccatcaccatcacggtggcagcaacatgtttgcgtattattcaagtctggaaaaccataccaatgacaagttcattagcaagatccgcggtgcaggcttcctgagccacaccgtggaatgggtagctcgcgagaagattcatggaacgaactttagcgttatcattactccgaccgaaatcgtgccggccaaacgcacagggccgatcttggaagacgagagcttctttggtcatgaaattatcatgaaaaaatatatggactccttcaaaaaggttcagaacatgctgaatgcgatggatcttgttagcgtgcaaatctttggcgaatttgcgggtggtggcattcagaaaggctttgattacggagacccggatttctatgtgtttgacatcctgtctgatagcgggaacgagaaaagctactgggatgactatcgcgtcgaatcgttttgcaccactgttggtctgaaattagcgcctctgctgggacgtggtagtttcgctgaactgtcccagtacccaaacgatttcaaaagcctggtgaaccgttataatgaattggttgatacggtcggcctggagatggccaataaacacgtctttggtccgcaagcgtcttctgaagaaggcctggcagaaggctacgttcttaaacccgtctatccgcgcttcgataatgtgggtacgcgcgtggcgattaaatgcaagaactccaaattttcggagaaagccggcctgattgaaccaattaaagcgaaggttgaactgacggagaacgataaacgtctgctcggaatctttagcgaatatgttacctggaaccgcgtcttgaacgtactgtcacatattggctcagtgacccagaaagattttggccgtgttgtgggtctgacgatgaaagacatcattcgcgaagcagcacgcgaaggccatgatctgttggaagctgataacccgtcggcggtgctgaaagagctggccggcctcatccagaacacgattcgctccaaatggcacgaagttctggag

SEQ ID NO: 3048 - protein, 346 aa, synthetic construct
  REGION 1..346: note = variant of RNA ligase 2 from Klebsiella phage KP179
MHHHHHHGGSNMFAYYSSLENHTNDKFISKIRGAGFLSHTVEWVAREKIHGTNFSVIITPTEIVPAKRTGPILEDESFFGHEIIMKKYMDSFKKVQNMLNAMDLVSVQIFGEFAGGGIQKGFDYGDPDFYVFDILSDSGNEKSYWDDYRVESFCTTVGLKLAPLLGRGSFAELSQYPNDFKSLVNRYNELVDTVGLEMANKHVFGPQASSEEGLAEGYVLKPVYPRFDNVGTRVAIKCKNSKFSEKAGLIEPIKAKVELTENDKRLLGIFSEYVTWNRVLNVLSHIGSVTQKDFGRVVGLTMKDIIREAAREGHDLLEADNPSAVLKELAGLIQNTIRSKWHEVLE

SEQ ID NO: 3049 - DNA, 1038 bp, synthetic construct
  misc_feature 1..1038: note = variant of RNA ligase 2 from Klebsiella phage KP179
  source 1..1038: mol_type = other DNA
atgcatcaccatcaccatcacggtggcagcaacatgtttgcgtattattcaagtctggaaaaccataccaatgccaagttcattagcaagatccgtggtgcaggcttcctgagccacaccgtggaatgggtagctcgcgagaagattcatggaacgaactttagcgttatcattactccgaccgaaatcgtgccggccaaacgcacagggccgatcttggaagacgagagcttctttggtcatgaaattatcatgaaaaaatatatggactccttcaaaaaggttcagaacatgctgaatgcgatggatcttgttagcgtgcaaatctttggcgaatttgcgggtggtggcattcagaaaggctttgattacggagacaaagatttctatgtgtttgacatcctgtctgatagcgggaacgagaaaagctactgggatgactatcgcgtcgaatcgttttgcaccactgttggtctgaaattagcgcctctgctgggacgtggtagtttcgctgaactgtcccagtacccaaacgatttcaaaagcctggtgaaccgttataatgaattggttgatacggtcggcctggagatggccaataaacacgtctttggtccgcaagcgtcttctgaagaaggcctggcagaaggctacgttcttaaacccgtctatccgcgcttctttaatgtgggtacgcgcgtggcgattaaatgcaagaactccaaattttcggagaaagcctttctgattgaaccaattaaagcgaaggttgaactgacggagaacgataaacgtctgctcggaatctttagcgaatatgttacctggaaccgcgtcttgaacgtactgtcacatattggctcagtgacccagaaagattttggccgtgttgtgggtctgacgatgaaagacatcattcgcgaagcagcacgcgaaggccatgatctgttgttcgctgataacccgtcggcggtgctggaagagctggccggcctcatccagaacacgattcgctccaaatggcacgaagttctggag

SEQ ID NO: 3050 - protein, 346 aa, synthetic construct
  REGION 1..346: note = variant of RNA ligase 2 from Klebsiella phage KP179
MHHHHHHGGSNMFAYYSSLENHTNAKFISKIRGAGFLSHTVEWVAREKIHGTNFSVIITPTEIVPAKRTGPILEDESFFGHEIIMKKYMDSFKKVQNMLNAMDLVSVQIFGEFAGGGIQKGFDYGDKDFYVFDILSDSGNEKSYWDDYRVESFCTTVGLKLAPLLGRGSFAELSQYPNDFKSLVNRYNELVDTVGLEMANKHVFGPQASSEEGLAEGYVLKPVYPRFFNVGTRVAIKCKNSKFSEKAFLIEPIKAKVELTENDKRLLGIFSEYVTWNRVLNVLSHIGSVTQKDFGRVVGLTMKDIIREAAREGHDLLFADNPSAVLEELAGLIQNTIRSKWHEVLE

SEQ ID NO: 3051 - DNA, 1038 bp, synthetic construct
  misc_feature 1..1038: note = variant of RNA ligase 2 from Klebsiella phage KP179
  source 1..1038: mol_type = other DNA
atgcatcaccatcaccatcacggtggcagcaacatgtttgcgtattattcaagtctggaaaaccataccaatgccaagttcattagcaagatcgaaggtgcaggcttcctgagccacaccgtggaatgggtagctcgcgagaagattcatggaacgaactttagcgttatcattactccgaccgaaatcgtgccggccaaacgcacagggccgatcttggaagacgagagcttctttggtcatgaaattatcatgaaaaaatatatggactccttcaaaaaggttcagaacatgctgaatgcgatggatcttgttagcgtgcaaatctttggcgaaatggcgggtggtggcattcagaaaggctttgattacggagacaaagatttctatgtgtttgacatcctgtctgatagcgggaacgagaaaagctactgggatgactatcgcgtcgaatcgttttgcaccactgttggtctgaaattagcgcctctgctgggacgtggtagtttcgctgaactgtcccagtacccaaacgatttcaaaagcctggtgaaccgttataatgaattggttgatacggtcggcctggagatggccaataaacacgtctttggtccgcaagcgtcttctgaagaaggcctggcagaaggctacgttcttaaacccgtctatccgcgcttctttaatgtgggtacgcgcgtggcgattaaatgcaagaacagcaaattttcggagaaagcctttctgattgaaccaattgaagcgaaggttgaactgacggagaacgatgaacgtctgctcggaatctttagcgaatatgttacctggaaccgcgtcttgaacgtactgtcacatattggctcagtgacccagaaagattttggccgtgttgtgggtctgacgatgaaagacatcattcgcgaagcagcacgcgaaggccatgatctgttgttcgctgataacccgtcggcggtgctgaaggagctggccggcctcatccagaacacgattcgctccaaatggcacgaagttctggag

SEQ ID NO: 3052 - protein, 346 aa, synthetic construct
  REGION 1..346: note = variant of RNA ligase 2 from Klebsiella phage KP179
MHHHHHHGGSNMFAYYSSLENHTNAKFISKIEGAGFLSHTVEWVAREKIHGTNFSVIITPTEIVPAKRTGPILEDESFFGHEIIMKKYMDSFKKVQNMLNAMDLVSVQIFGEMAGGGIQKGFDYGDKDFYVFDILSDSGNEKSYWDDYRVESFCTTVGLKLAPLLGRGSFAELSQYPNDFKSLVNRYNELVDTVGLEMANKHVFGPQASSEEGLAEGYVLKPVYPRFFNVGTRVAIKCKNSKFSEKAFLIEPIEAKVELTENDERLLGIFSEYVTWNRVLNVLSHIGSVTQKDFGRVVGLTMKDIIREAAREGHDLLFADNPSAVLKELAGLIQNTIRSKWHEVLE

SEQ ID NO: 3053 - DNA, 1038 bp, synthetic construct
  misc_feature 1..1038: note = variant of RNA ligase 2 from Klebsiella phage KP179
  source 1..1038: mol_type = other DNA
atgcatcaccatcaccatcacggtggcagcaacatgtttgcgtattattcaagtctggaaaaccataccaatgacaagttcattagcaagatccgcggtgcaggcttcctgagccacaccgtggaatgggtagctcgcgagaagattcatggaacgaactttagcgttatcattactccgaccgaaatcgtgccggccaaacgcacagggccgatcttggaagacgagagcttctttggtcatgaaattatcatgaaaaaatatatggactccttcaaaaaggttcagaacatgctgaatgcgatggatcttgttagcgtgcaaatctttggcgaatttgcgggtggtggcattcagaaaggctttgattacggagacaaagatttctatgtgtttgacatcctgtctgatagcgggaacgagaaaagctactgggatgactatcgcgtcgaatcgttttgcaccactgttggtctgaaattagcgcctctgctgggacgtggtagtttcgctgaactgtcccagtacccaaacgatttcaaaagcctggtgaaccgttataatgaattggttgatacggtcggcctggagatggccaataaacacgtctttggtccgcaagcgtcttctgaagaaggcctggcagaaggctacgttcttaaacccgtctatccgcgcttcttaaatgtgggtacgcgcgtggcgattaaatgcaagaacgaaaaattttcggagaaagcctttctgattgaaccaattaaagcgaaggttgaactgacggagaacgatgaacgtctgctcggaatctttagcgaatatgttacctggaaccgcgtcttgaacgtactgtcacatattggctcagtgacccagaaagattttggccgtgttgtgggtctgacgatgaaagacatcattcgcgaagcagcacgcgaaggccatgatctgttgtttgctgataacccgtcggcggtgctgaaggagctggccggcctcatccagaacacgattcgctccaaatggcacgaagttctggag

SEQ ID NO: 3054 - protein, 346 aa, synthetic construct
  REGION 1..346: note = variant of RNA ligase 2 from Klebsiella phage KP179
MHHHHHHGGSNMFAYYSSLENHTNDKFISKIRGAGFLSHTVEWVAREKIHGTNFSVIITPTEIVPAKRTGPILEDESFFGHEIIMKKYMDSFKKVQNMLNAMDLVSVQIFGEFAGGGIQKGFDYGDKDFYVFDILSDSGNEKSYWDDYRVESFCTTVGLKLAPLLGRGSFAELSQYPNDFKSLVNRYNELVDTVGLEMANKHVFGPQASSEEGLAEGYVLKPVYPRFLNVGTRVAIKCKNEKFSEKAFLIEPIKAKVELTENDERLLGIFSEYVTWNRVLNVLSHIGSVTQKDFGRVVGLTMKDIIREAAREGHDLLFADNPSAVLKELAGLIQNTIRSKWHEVLE

SEQ ID NO: 3055 - DNA, 1038 bp, synthetic construct
  misc_feature 1..1038: note = variant of RNA ligase 2 from Klebsiella phage KP179
  source 1..1038: mol_type = other DNA
atgcatcaccatcaccatcacggtggcagcaacatgtttgcgtattattcaagtctggaaaaccataccaatgacaagttcattagcaagatccgcggtgcaggcttcctgagccacaccgtggaatgggtagctcgcgagaagattcatggaacgaactttagcgttatcattactccgaccgaaatcgtgccggccaaacgcacagggccgatcttggaagacgagagcttctttggtcatgaaattatcatgaaaaaatatatggactccttcaaaaaggttcagaacatgctgaatgcgatggatcttgttagcgtgcaaatctttggcgaaatggcgggtggtggcattcagaaaggctttgattacggagacaaagatttctatgtgtttgacatcctgtctgatagcgggaacgagaaaagctactgggatgactatcgcgtcgaatcgttttgcaccactgttggtctgaaattagcgcctctgctgggacgtggtagtttcgctgaactgtcccagtacccaaacgatttcaaaagcctggtgaaccgttataatgaattggttgatacggtcggcctggagatggccaataaacacgtctttggtccgcaagcgtcttctgaagaaggcctggcagaaggctacgttcttaaacccgtctatccgcgcttcttaaatgtgggtacgcgcgtggcgattaaatgcaagaacgaaaaattttcggagaaagcctttctgattgaaccaattaaagcgaaggttgaactgacggagaacgataaacgtctgctcggaatctttagcgaatatgttacctggaaccgcgtcttgaacgtactgtcacatattggctcagtgacccagaaagattttggccgtgttgtgggtctgacgatgaaagacatcattcgcgaagcagcacgcgaaggccatgatctgttggaagctgataacccgtcggcggtgctgaaggagctggccggcctcatccagaacacgattcgctccaaatggcacgaagttctggag

SEQ ID NO: 3056 - protein, 346 aa, synthetic construct
  REGION 1..346: note = variant of RNA ligase 2 from Klebsiella phage KP179
MHHHHHHGGSNMFAYYSSLENHTNDKFISKIRGAGFLSHTVEWVAREKIHGTNFSVIITPTEIVPAKRTGPILEDESFFGHEIIMKKYMDSFKKVQNMLNAMDLVSVQIFGEMAGGGIQKGFDYGDKDFYVFDILSDSGNEKSYWDDYRVESFCTTVGLKLAPLLGRGSFAELSQYPNDFKSLVNRYNELVDTVGLEMANKHVFGPQASSEEGLAEGYVLKPVYPRFLNVGTRVAIKCKNEKFSEKAFLIEPIKAKVELTENDKRLLGIFSEYVTWNRVLNVLSHIGSVTQKDFGRVVGLTMKDIIREAAREGHDLLEADNPSAVLKELAGLIQNTIRSKWHEVLE

SEQ ID NO: 3057 - DNA, 1038 bp, synthetic construct
  misc_feature 1..1038: note = variant of RNA ligase 2 from Klebsiella phage KP179
  source 1..1038: mol_type = other DNA
atgcatcaccatcaccatcacggtggcagcaacatgtttgcgtattattcaagtctggaaaaccataccaatgccaagttcattagcaagatccgcggtgcaggcttcctgagccacaccgtggaatgggtagctcgcgagaagattcatggaacgaactttagcgttatcattactccgaccgaaatcgtgccggccaaacgcacagggccgatcttggaagacgagagcttctttggtcatgaaattatcatgaaaaaatatatggactccttcaaaaaggttcagaacatgctgaatgcgatggatcttgttagcgtgcaaatctttggcgaaatggcgggtggtggcattcagaaaggctttgattacggagacaaagatttctatgtgtttgacatcctgtctgatagcgggaacgagaaaagctactgggatgactatcgcgtcgaatcgttttgcaccactgttggtctgaaattagcgcctctgctgggacgtggtagtttcgctgaactgtcccagtacccaaacgatttcaaaagcctggtgaaccgttataatgaattggttgatacggtcggcctggagatggccaataaacacgtctttggtccgcaagcgtcttctgaagaaggcctggcagaaggctacgttcttaaacccgtctatccgcgcttctttaatgtgggtacgcgcgtggcgattaaatgcaagaactccaaattttcggagaaagcctttctgattgaaccaattaaagcgaaggttgaactgacggagaacgataaacgtctgctcggaatctttagcgaatatgttacctggaaccgcgtcttgaacgtactgtcacatattggctcagtgacccagaaagattttggccgtgttgtgggtctgacgatgaaagacatcattcgcgaagcagcacgcgaaggccatgatctgttgttcgctgataacccgtcggcggtgctggaagagctggccggcctcatccagaacacgattcgctccaaatggcacgaagttctggag

SEQ ID NO: 3058 - protein, 346 aa, synthetic construct
  REGION 1..346: note = variant of RNA ligase 2 from Klebsiella phage KP179
MHHHHHHGGSNMFAYYSSLENHTNAKFISKIRGAGFLSHTVEWVAREKIHGTNFSVIITPTEIVPAKRTGPILEDESFFGHEIIMKKYMDSFKKVQNMLNAMDLVSVQIFGEMAGGGIQKGFDYGDKDFYVFDILSDSGNEKSYWDDYRVESFCTTVGLKLAPLLGRGSFAELSQYPNDFKSLVNRYNELVDTVGLEMANKHVFGPQASSEEGLAEGYVLKPVYPRFFNVGTRVAIKCKNSKFSEKAFLIEPIKAKVELTENDKRLLGIFSEYVTWNRVLNVLSHIGSVTQKDFGRVVGLTMKDIIREAAREGHDLLFADNPSAVLEELAGLIQNTIRSKWHEVLE

SEQ ID NO: 3059 - DNA, 1038 bp, synthetic construct
  misc_feature 1..1038: note = Engineered RNA ligase 2 from Klebsiella phage KP179
  source 1..1038: mol_type = other DNA
atgcatcaccatcaccatcacggtggcagcggtatgtttgcgaaatattcaagtctggaaaaccattacaataataagttcattgagaagatccgtggtgcaggcttcgatatgcacaccgtggaatgggtagctcgcgagaagattcatggaacgaactttagcgttatcattactccgaccgaaatcgtcccagccaaacgcacagggccgatcttggaaggcgagtcgttctttggtcacgaaattatcatgaagaaatataaagactccttcgtgaagatgcagaacatgctgaatgccatggatcttgttagcgtgcaaatctttggcgaatttgcgggtggtggcattcagaaaggcgtcgattacggagacaaagatttctatgtgtttgacatcctgtctgatagcgggaacgagaaagtttactgggatgactatgtagtcgaatcgtttgcaaccggcctcggtttaaaattagcgcctctgctgggacgtggtagtttcgctgaactgtcccagtacgtgaacgatttcaaaagcattgtgaactattataatgaattggttgatacgacggacctggaacatgccaataaacacgtctttggtccgcaagcgtcttctgaaactggcgtagcagaaggctacgttcttaaacccgtcaacccgaaattctttaataatggtacacgcgtggcgattaaatgcaagaactccaaattttcggagaaagccaagagcgacaaaccaattaaagcgaaagtggaactgaccgagaacgataaacgtgtgctcgaaatctttagcgagtatgttacctggaatcgcgtcagtaacgtactgtcacatattggctcagtgaccgccaaagattttgggcgtgttatgggtctgacgatgaaagacatcattaatgaagcagcacgcgaaggccatgatatgttgttcgctgataacccgtcggcggtgaagaaagagctgaccattctcatccagaacacgattcgttccaaatggcacgaagttctggag

SEQ ID NO: 3060 - protein, 346 aa, synthetic construct
  REGION 1..346: note = Engineered RNA ligase 2 from Klebsiella phage KP179
MHHHHHHGGSGMFAKYSSLENHYNNKFIEKIRGAGFDMHTVEWVAREKIHGTNFSVIITPTEIVPAKRTGPILEGESFFGHEIIMKKYKDSFVKMQNMLNAMDLVSVQIFGEFAGGGIQKGVDYGDKDFYVFDILSDSGNEKVYWDDYVVESFATGLGLKLAPLLGRGSFAELSQYVNDFKSIVNYYNELVDTTDLEHANKHVFGPQASSETGVAEGYVLKPVNPKFFNNGTRVAIKCKNSKFSEKAKSDKPIKAKVELTENDKRVLEIFSEYVTWNRVSNVLSHIGSVTAKDFGRVMGLTMKDIINEAAREGHDMLFADNPSAVKKELTILIQNTIRSKWHEVLE
